(19) United States
(12) Patent Application Publication
(10) Pub. No.: US 2007/0161081 A1
(43) Pub. Date: Jul. 12, 2007

(54) Hepatocyte growth factor intron fusion proteins

(75) Inventors: Pei Jin, Palo Alto, CA (US); H. Michael Shepard, San Francisco, CA (US); Irene Y. Ni, Foster City, CA (US)

Correspondence Address: MORRISON & FOERSTER LLP, 755 PAGE MILL RD, PALO ALTO, CA, 94304-1018, US

(73) Assignee: Receptor Biologix, Inc., South San Francisco, CA (US)

(21) Appl. No.: 11/590,955

(22) Filed: Oct. 31, 2006

Related U.S. Application Data
(60) Provisional application No. 60/735,609, filed on Nov. 10, 2005.

(51) Int. Cl. A61K 38/18; C07K 14/475; C07H 21/04; C12P 21/06

(52) U.S. Cl. 435/69.1; 435/320.1; 435/325; 514/12; 530/399; 536/23.5

(57) ABSTRACT

Isoforms of ligands, including isoforms of hepatocyte growth factor (HGF) containing an intron-encoded portion, and pharmaceutical compositions containing HGF isoforms are provided. The HGF ligand isoforms and compositions containing them can be used in methods of treatment of diseases, such as cancer and other angiogenic diseases.

### RELATED APPLICATIONS

[0001] Benefit of priority is claimed to U.S. provisional application Ser. No. 60/735,609, filed Nov. 10, 2005, entitled “HEPATOCYTE GROWTH FACTOR INTRON FUSION PROTEINS,” to Pei Jin, H. Michael Shepard, and Irene Ni.

[0002] This application is related to International PCT Application Serial No. (Attorney Docket No. 17118-045W01/2824PC), filed the same day herewith, entitled “HEPATOCYTE GROWTH FACTOR INTRON FUSION PROTEINS,” to Receptor Biologix, Inc., Pei Jin, H. Michael Shepard, and Irene Ni, which also claims priority to U.S. Provisional Application Ser. No. 60/735,609.

[0003] This application also is related to U.S. application Ser. No. 10/846,113, filed May 14, 2004, and to corresponding International PCT application No. WO 05/016966, published Feb. 24, 2005, entitled “INTRON FUSION PROTEINS, AND METHODS OF IDENTIFYING AND USING SAME.” This application also is related to U.S. application Ser. No. 11/129,740, filed May 13, 2005, and to corresponding International PCT application No. PCT/US2005/17051, filed May 13, 2005, entitled “CELL SURFACE RECEPTOR ISOFORMS AND METHODS OF IDENTIFYING AND USING THE SAME.” The application also is related to U.S. application Ser. No. 11/429,090 and to corresponding International PCT application No. PCT/US2006/17786, which each claim priority to U.S. provisional application No. 60/678,076, entitled “ISOFORMS OF RECEPTOR FOR ADVANCED GLYCATION END PRODUCTS (RAGE) AND METHODS OF IDENTIFYING AND USING SAME”, filed May 4, 2005. This application also is related to U.S. application No. (Attorney Docket No. 17118-041001/ 2822) and to International application No. (Attorney Docket No. 17118-041WO1/ 2822PC) filed the same day herewith, which each claim priority to provisional application No. 60/736,134, entitled “METHODS FOR PRODUCTION OF RECEPTOR AND LIGAND ISOFORMS,” filed Nov. 10, 2005.

[0004] The subject matter of each of the above-noted applications, provisional applications and international applications as well as any applications noted throughout the disclosure herein is incorporated herein by reference thereto.

### INCORPORATION BY REFERENCE OF SEQUENCE LISTING PROVIDED ON COMPACT DISCS

[0005] An electronic version on compact disc (CD) ROM of the Sequence Listing is filed herewith in duplicate, the contents of which are incorporated by reference in their entirety. The computer-readable file on each of the aforementioned duplicate compact discs created on Oct. 31, 2006, is identical, 971 kilobytes in size, and is entitled 2824SEQ.001.txt.

### FIELD OF THE INVENTION

[0006] Isoforms of ligands, including isoforms of hepatocyte growth factor (HGF) containing an intron-encoded portion, and pharmaceutical compositions containing HGF isoforms are provided. The HGF ligand isoforms and compositions containing them can be used in methods of treatment of diseases, such as cancer and other angiogenic diseases.

### BACKGROUND

[0007] Growth factors are produced by many different cell types and exert their effects via autocrine and paracrine mechanisms. They function as stimulators or inhibitors of the division, differentiation and migration of cells and are involved in carcinogenesis, in which they influence a variety of functions including cell proliferation, cell invasion, metastasis formation, angiogenesis, local immune system functions and extracellular matrix synthesis. In particular, invasion of tumor cells and subsequent establishment of metastasis are devastating events associated with cancer progression and severity.

[0008] Hepatocyte growth factor (HGF, also called scatter factor) is a growth factor ligand for the c-met protooncogene (MET receptor). In normal tissues, HGF plays a role in the construction and reconstruction of tissues during organogenesis and tissue regeneration including the development of embryonic tissues including the liver, kidney, lung, mammary gland, teeth, placenta, and skeletal muscle. HGF also plays a role in the regeneration and protection of mature tissues. In malignant tissues, however, tumor cells utilize the biological actions of HGF for their invasion and metastatic behavior. HGF promotes the invasive behavior of tumors by regulating cell-cell adhesion, cell-matrix association, proteolytic breakdown of the extracellular matrix, cellular locomotion, and angiogenesis.

[0009] Because of its involvement in proliferative and angiogenic diseases, including many cancers, HGF is a target for therapeutic intervention. Small molecule therapeutics that target the HGF or its receptor, MET, have been designed. While it may be possible to design small molecules as therapeutics that target such cell surface receptors and/or other angiogenic receptors or their ligands, there are, however, a number of limitations with such strategies. Small molecules can be promiscuous and affect receptors other than the intended target. Additionally, some small molecules bind irreversibly or substantially irreversibly to the receptors (i.e. subnanomolar binding affinity). The merits of such approaches have not been validated. Antibodies against receptor and/or receptor ligands can be used as therapeutics. Antibody treatments, however, can result in an immune response in a subject and thus, such treatments often need extensive tailoring to avoid complications in treatment. Thus, there exists an unmet need for therapeutics for treatment of diseases, including cancers and other diseases involving undesirable cell proliferation and angiogenic reactions. Accordingly, among the objects herein, it is an object to provide such therapeutics and methods for identifying or discovering candidate therapeutics and methods of treatment.

### SUMMARY

[0010] Provided herein are therapeutics for treatment of diseases, including cancers and other diseases involving undesirable cell proliferation, angiogenic and inflammatory reactions. Also provided are methods for identifying or discovering candidate therapeutics and methods of treatment using the therapeutics. The therapeutics are polypeptides or modified polypeptides, such as polypeptides including peptidomimetic bonds.

[0011] HGF polypeptide isoforms are provided. Among the isoforms are isolated HGF polypeptide isoforms that contain all or a portion of a K4 domain of an HGF ligand. The portion is sufficient to confer an activity exhibited by the K4 domain, or contains at least 2, 3, 4, 5, 6, 7, 8, 9, 10, 15, 20, 25, 30 or more amino acids therefrom. Among these are HGF isoform polypeptides that are intron fusion proteins. The isolated HGF polypeptide isoforms also can include all or part of a SerP domain.

[0012] Exemplary of the HGF isoforms are those encoded by a sequence of nucleotides that includes all or a portion of an intron selected from among introns 1, 2, 3, 4, 5, 6, 7, 8, 9, 10, 11, 12, 13, 14, 15, 16, and 17 of a cognate HGF gene (i.e., the gene that encodes the HGF ligand that includes all exons), such as the human HGF gene. The sequence of an allele thereof is set forth in SEQ ID NO: 1. Also provided are HGF isoforms that are allelic, species or other variants thereof, including, for example, isoforms for which the cognate HGF ligand has at least 80%, 85%, 90%, 95%, 96%, 97%, 98% or 99% or more sequence identity with the sequence of amino acids encoded by the corresponding portions of SEQ ID NO: 1. The portion encoded by an intron can be one codon, including a stop codon, or more codons, so that the resulting HGF isoforms either stops at the end of the exon or includes 1, 2, 3, or more amino acids encoded by an intron.

[0013] Also provided are isolated HGF polypeptide isoforms described above that include all or part of an N-terminal domain, all or part of a K1 domain, all or part of a K2 domain, or all or part of a K3 domain or any combination thereof. Among the isoforms provided are those that are encoded by a nucleic acid molecule that includes all or a portion of intron 11. The portion can be one codon, including a stop codon, so that the resulting isoforms stops at the end of the exon and includes no other amino acids, or the portion can be more than one codon so that the isoform includes, 1, 2, 3, 4, 5, 6, 7, 8, 9, 10, 11, 12, 13, 14, 15, 16, 17 18, 19, 20, 21 up to all of the amino acids encoded by an intron. In exemplary embodiments the isoforms includes one, two or three amino acids encoded by intron 11.

[0014] Provided are HGF polypeptide isoforms that have at least 80%, 85%, 90%, 95%, 96%, 97%, 98%, 99% or 100% sequence identity with a sequence of amino acids set forth in any of SEQ ID NOS: 10, 12, 18, or 20 and/or is an allelic or species variant thereof. An exemplary allelic variant of the HGF polypeptide has the sequence of amino acids set forth in SEQ ID NO: 16. As a result, HGF isoforms will include the variations present in any exon or intron that is part of the particular isoforms. Among HGF isoform variants provided herein are those that contain the same number of amino acids as set forth in any of SEQ ID NOS: 10, 12, 18, or 20.

[0015] Among the isoforms provided are those that are encoded by a nucleic acid molecule that includes all or a portion of intron 13. The portion can be one codon, including a stop codon, so that the resulting isoforms stop at the end of the exon and include no other amino acids, or the portion can be more than one codon so that the isoforms includes, 1, 2, 3, 4, 5, 6, 7, 8, 9, 10, 11, 12, 13, 14, 15, 16, 17 18, 19, 20, 21 up to all of the amino acids encoded by intron 13. In exemplary embodiments the isoforms include one, two or three amino acids encoded by intron 13. Provided are HGF polypeptide isoforms that have at least 80%, 85%, 90%, 95%, 96%, 97%, 98%, 99% or 100% sequence identity with a sequence of amino acids set forth in SEQ ID NO: 14, as well as allelic and species variants thereof, including portions of the allelic variant whose sequence is set forth in SEQ ID NO: 16. This includes variants that contain the same number of amino acids as set forth in SEQ ID NO: 14.

[0016] The isolated HGF polypeptide isoforms provided herein include those that act as an antagonist of an HGF polypeptide, such as the cognate HGF polypeptide; those that bind to a MET receptor; those that inhibit one or more MET-mediated activities selected from among mitogenesis, morphogenesis and motogenesis; those that inhibit angiogenesis; those that bind to a glycosaminoglycan, such as heparin sulfate; those that bind to an angiogenic molecule, such as any of ATP synthase, angiomotin, αvβ3 integrin, annexin II, MET, VEGFR, and FGFR; those that inhibit angiogenesis induced by a cognate HGF, FGF-2 and/or VEGF; and those that are an HGF antagonist and inhibit angiogenesis. An HGF isoform can possess one or more of any of these activities and/or other activities.

[0017] Also provided are pharmaceutical compositions that contain one or more of the HGF polypeptide isoforms in a pharmaceutically acceptable carrier. The pharmaceutical compositions can be formulated for administration by any suitable route. The compositions can include additional active agents, including, but not limited to, other anti-cancer and/or anti-angiogenesis agents. The amount of HGF isoforms is effective for a particular activity, including antagonizing a cognate HGF polypeptide, such as where antagonizing a cognate HGF inhibits one or more of a MET-mediated activity selected from any one or more of mitogenesis, motogenesis and morphogenesis; and/or inhibiting angiogenesis, such as angiogenesis induced by a cognate HGF, FGF-2 and/or VEGF.

[0018] Nucleic acid molecules encoding any of the HGF polypeptides are provided. Nucleic acid molecules provided contain all or part of an exon and at least one codon from an intron other than intron 5. The intron can contain a stop codon at any locus including the first locus. For example, provided are nucleic acid molecules that encode an open reading frame that spans an exon intron junction, where the open reading frame terminates at the stop codon in an intron (other than in intron 5), such as intron 11 or 13. Also provided are nucleic acid molecules where a stop codon is the first codon in the intron, such as intron 13. In exemplary embodiments provided are nucleic acid molecules containing a sequence of nucleotides set forth in any one of SEQ ID NOS: 9, 11, 13, 17, or 19, or an allelic variant thereof, such one or more of the variations in SEQ ID NO:15, or species variants. Also provided are nucleic acid molecules that encode an isoform, as noted above, that includes all or part of a K4 domain and that has at least 60, 65, 70, 75, 80, 85, 90, 91, 92, 93, 94, 95, 96, 97, 98, 99% sequence identity to any of SEQ ID NOS: 9, 11, 13, 17, or 19; or that hybridizes under conditions of medium or high stringency along at least 70% of its full length to a nucleic acid molecule comprising a sequence of nucleotides set forth in any of SEQ ID NOS: 9, 11, 13, 17, or 19 wherein the encoded polypeptide contains a K4 domain and contains at least one codon from an intron. Also provide are nucleic acid molecules that contain degenerate codons of any of the noted nucleic acid molecules. Also provided are nucleic acid molecules that are splice variants of an HGF gene and that include all or a portion of an intron other than intron 5. Polypeptides encoded by any of these nucleic acid molecules are provided, as are vectors that contain any of the nucleic acid molecules. The vectors include eukaryotic and prokaryotic vectors, expression vectors, such as mammalian expression vectors, and vectors suitable for gene therapy. Exemplary vectors are viral vectors including, but not limited to adenovirus vectors, adeno-associated virus vectors, EBV vectors, SV40 vectors, cytomegalovirus vectors, vaccinia virus vectors, herpesvirus vectors, retroviral vectors and lentivirus vectors. Also included are artificial chromosomes. Vectors can be episomal or integrative.

[0019] Cells containing the vectors are provided. The cells include eukaryotic cells, including mammalian and insect cells, and prokaryotic cells.

[0020] Methods of treatment are provided. The methods can be effected by administering a pharmaceutical composition containing an HGF isoform provided herein, and/or by gene therapy through introduction of a nucleic acid molecule encoding such isoforms. Gene therapy methods include ex vivo methods, which includes introduction into host cells removed from the subject or a compatible source, and in vivo methods, which include topical, local and system administration. Ex vivo treatment can include administering the nucleic acid into a cell in vitro, followed by administration of the cell into the subject. The cell can be from a suitable donor or from the subject, such as a human, to be treated.

[0021] Methods for treating a disease or condition by administering a pharmaceutical composition containing one or more isoforms are provided. The isoforms can be one that inhibits angiogenesis, cell proliferation, cell migration, tumor cell growth and/or tumor cell metastasis. Conditions treated include, but are not limited to, cancer, angiogenic disease and malaria. Angiogenic diseases include ocular disease, endometriosis, arthritis and other chronic or acute inflammatory diseases. Exemplary diseases are rheumatoid arthritis, osteoarthritis, psoriasis, Osler-Webber syndrome, endometriosis, Still's disease, angiogenesis of the heart-muscle, peripheral hemangiectasis, hemophilic arthritis, age-related macular degeneration, retinopathy of prematurity, rejection to keratoplasty, systemic lupus erythematosus, atherosclerosis, neovascular glaucoma, choroidal neovascularization, retrolental fibroplasias, perosis, neurofibroma, hemangioma, acoustic neuroma, neurofibroma, trachoma, suppurative granuloma, and diabetes related diseases, such as proliferative diabetic retinopathy and vascular diseases, inflammatory lung disease, Crohn's disease and psoriasis. Cancers that can be treated include gastric, lung, breast, colon, pancreatic, prostate and other tumors and blood cancer, and include carcinomas, lymphomas, blastomas, sarcoma, and leukemia or lymphoid malignancies, squamous cell cancers, lung cancers, small-cell lung cancers, non-small cell lung cancers, adenocarcinomas of the lung, squamous carcinomas of the lung, cancers of the peritoneum, hepatocellular cancers, gastric or stomach cancers, gastrointestinal cancers, pancreatic cancers, glioblastomas, cervical cancers, ovarian cancers, liver cancers, bladder cancers, hepatomas, breast cancers, colon cancers, rectal cancers, colorectal cancers, endometrial or uterine carcinomas, salivary gland carcinomas, kidney or renal cancers, prostate cancers, vulval cancers, thyroid cancers, hepatic carcinomas, anal carcinomas, penile carcinomas and head and neck cancers. The particular isoforms to employ can be determined empirically as needed. The compositions can be administered to inhibit tumor invasion or metastasis of a tumor and/or to inhibit angiogenesis.

[0022] Conjugates that contain HGF isoforms linked, directly or indirectly via a linker to another moiety are provided. Conjugates include fusion proteins and also chemical conjugates. Conjugates can contain HGF isoforms or domains thereof or functional portion thereof, and a second portion from a different HGF isoform or from a cell surface receptor (CSR) isoform or ligand isoform. Cell surface receptor isoforms include, for example, all or part of an extracellular domain of the cell surface receptor isoforms. Cell surface receptor isoforms include receptor tyrosine kinases, such as all or part of a herstatin polypeptide. Exemplary herstatin polypeptides include a sequence of amino acids set forth in any one of SEQ ID NOS:186-200 or allelic or species variants thereof.

[0023] Also provided are conjugates that are chimeric polypeptides that contain all or at least one domain of an HGF isoform and all of or at least one domain of a different HGF isoform or of another cell surface receptor isoform, such as an intron fusion protein. Other chimeric polypeptides include all of or at least one domain of an HGF isoform and an intron-encoded portion of a cell surface receptor isoform.

[0024] Also provided are combinations that contain one or more HGF isoform(s) and a containing one or more other cell surface receptor isoforms and/or a therapeutic drug. Such combinations include those where the isoforms and/or drugs are in separate compositions or in a single composition. The combinations can be provided as a kit, with optional instructions for use and/or with other reagents and utensils and components for administration and use of the components of the combination. Methods of treatment by administering the combinations are provided. Each component can be administered separately, simultaneously, intermittently, in a single composition or combinations thereof.

[0025] Cell surface receptor isoforms for inclusion in the combinations or conjugates include, but are not limited to, isoforms of VEGFR, FGFR, DDR, TNFR, PDGFR, MET, TIE, RAGE, EPH or HER. The isoforms can be intron fusion proteins. Exemplary Met isoforms contain a sequence of amino acids selected from any one of SEQ ID NOS: 85, 87, 89, 91, 93, 95, 97, 99, 101, 103, 105, 107, 109, 111, 113 and 114.

[0026] Also provided are fusion proteins or conjugates that contain a fragment of a CD45 polypeptide linked directly or via a linker to a protein, where the fragment of CD45 is selected to add carbohydrates or glycosylation sites, and hence includes at least one such site and a sufficient amount to extend serum half-life of a linked moiety, such as a polypeptides. Fusion proteins contain the CD45 polypeptide or fragment thereof linked directly or indirectly to polypeptide; conjugates contain the CD45 polypeptide or fragment thereof linked directly or indirectly to a non-peptide moiety, typically a therapeutic agent. Linked agents include proteins and other agents, such as small molecule therapeutics. Linked proteins include therapeutic proteins, such as a CSR or ligand isoform or, a cytokine, CSR, ligand, growth factor, hormone or forms thereof that include additional amino acids on the end. The CD45 polypeptide or fragment contains a sufficient number of glycosylation sites or carbohydrates, whereby serum half-life of the protein is increased by 1%, 5%, 10%, 20%, 30%, 40%, 50%, 60%, 70%, 80%, 90%, 95%, 96%, 97%, 98%, 99% or greater. Linkage can be direct or via a chemical linkage, such as a peptide linkage or a chemical linker, including a linkage resulting from a heterobifunctional linker, and/or it can be a photocleavable linker. The conjugate or fusion protein optionally includes a polypeptide or peptide or amino acid linker, which can contain 1-30, 1-10, 2-10 or 2-15 or more amino acid residues. An exemplary CD45 polypeptide or fragment thereof contains the sequence of amino acids set forth in any of SEQ ID NOS: 272, 274, 275, 276, 277, 278, 279, 281, 283, 285, 287, 289, 291, 293 and 295, or fragments thereof or variants thereof.

[0027] The protein linked to the CD45 protein can be a ligand, such as HGF or isoforms hereof, or a CSR or CSR isoform or a form of ligand, CSR or isoform containing additional amino acids. Exemplary proteins include, but are not limited to, those that contain a sequence of amino acids set forth in any of SEQ ID NOS: 3, 10, 12, 14, 16, 18, 20, 22, 24, 26, 28, 30, 32, 34, 35, 37, 39, 40, 42, 44, 46, 47, 49, 50, 52, 54, 56, 58, 59, 60, 61, 62, 63, 64, 65, 67, 69, 71, 73, 75, 77, 78, 80, 82, 83, 85, 87, 89, 91, 93, 95, 97, 99, 101, 103, 105, 107, 109, 111, 113, 114, 116, 118, 120, 122, 124, 126, 127, 128, 130, 132, 134, 136, 138, 140, 142, 144, 145, 146, 147, 148, 150, 152, 154, 156, 158, 160, 161, 162, 163, 164, 165, 166, 167, 169, 171, 172, 173, 174, 175, 176, 177, 179, 181, 183, 185, 186, 187, 188, 189, 190, 191, 192, 193, 194, 195, 196, 197, 198, 199, 200, 216, 217, 218, 219, 220, 221, 222, 223, 224, 225, 226, 227, 228, 229, 230, 246, 247, 248, 249, 250 and 251, or allelic variants thereof.

### BRIEF DESCRIPTION OF THE FIGURES

[0028] FIG. 1 depicts the genomic organization of an exemplary HGF gene (see SEQ ID NO: 1 for the sequence thereof). The HGF gene contains 18 exons (solid) interrupted by 17 introns (dashed). A predominant splice form of HGF contains a polypeptide encoded by the 18 exons. HGF isoforms provided herein are encoded by alternatively spliced variants of the HGF gene and are encoded by exons and at least one codon from an intron portion. The exon-intron organization of nucleic acid encoding exemplary HGF isoforms SR023A01, SR023A08, and SR023E09 is depicted. The asterix depicts a stop codon within the intron portion of the gene thereby resulting in a truncated isoform. The open box in exon 5 of the SR023A02 isoform denotes a deleted portion of exon 5. HGF isoforms include all or part of any one or more of introns of the HGF gene operatively linked to an exon of HGF resulting in an intron fusion protein of HGF.

[0029] FIG. 2 depicts the domain organization of a cognate HGF. The figure depicts the domain organization of HGF isoforms including SR023A02, SR023A08, and SR023E09.

[0030] FIG. 3 depicts an overview of the contribution of HGF in cancer progression, including tumor growth and angiogenesis. HGF acts (A) as a morphogenic and mitogenic factor promoting the scattering and migration, invasion, and metastasis of cancer cells, (B) as a mitogenic factor stimulating the proliferation of cancer cells thereby promoting tumor growth, and (C) as an angiogenic factor thereby promoting angiogenesis and growth of blood vessels which contributes to the metastasis and growth of primary and secondary tumors. Target points for modulation of these pathways by HGF isoforms are indicated.

### DETAILED DESCRIPTION

Outline

[0031] A. DEFINITIONS

[0032] B. HEPATOCYTE GROWTH FACTOR (HGF) AND MET RECEPTOR
[0033] 1. HGF
   [0034] a. HGF DOMAIN STRUCTURE
      [0035] i. N TERMINAL DOMAIN
      [0036] ii. KRINGLE DOMAINS
      [0037] iii. β-CHAIN
[0038] 2. HGF VARIANTS
   [0039] a. HGF SPLICE VARIANTS
   [0040] b. HGF ALLELIC VARIANTS
[0041] 3. MET RECEPTOR

[0042] C. HGF ISOFORMS
[0043] 1. CLASSES OF HGF ISOFORMS
[0044] 2. ALTERNATIVE SPLICING AND GENERATION OF HGF ISOFORMS
   [0045] a. INTRON MODIFICATION AND INTRON FUSION PROTEINS
      [0046] i. NATURAL INTRON FUSION PROTEINS
      [0047] ii. COMBINATORIAL INTRON FUSION PROTEINS
   [0048] b. ISOFORMS GENERATED BY EXON MODIFICATIONS
[0049] 2. HGF ISOFORM POLYPEPTIDE STRUCTURE
[0050] 3. HGF ISOFORM ACTIVITIES
   [0051] a. CELL SURFACE ACTION ALTERATIONS
   [0052] b. COMPETITIVE ANTAGONIST
   [0053] c. NEGATIVELY ACTING AND INHIBITORY ISOFORMS

[0054] D. METHODS FOR IDENTIFYING AND GENERATING HGF ISOFORMS
[0055] 1. METHODS FOR IDENTIFYING AND ISOLATING ISOFORMS
[0056] 2. IDENTIFICATION OF ALLELIC AND SPECIES VARIANTS OF ISOFORMS

[0057] E. EXEMPLARY HGF ISOFORMS
[0058] 1. HGF ISOFORMS
[0059] 2. HGF INTRON FUSION PROTEINS

[0060] F. METHODS FOR PRODUCING NUCLEIC ACIDS ENCODING HGF ISOFORM POLYPEPTIDES
[0061] 1. SYNTHETIC GENES AND POLYPEPTIDES
[0062] 2. METHODS OF CLONING AND ISOLATING HGF ISOFORMS
[0063] 3. EXPRESSION SYSTEMS
   [0064] a. PROKARYOTIC EXPRESSION
   [0065] b. YEAST
   [0066] c. INSECT CELLS
   [0067] d. MAMMALIAN CELLS
   [0068] e. PLANTS

[0069] G. ISOFORM CONJUGATES
[0070] 1. ISOFORM FUSIONS
   [0071] a. HGF ISOFORM FUSIONS FOR IMPROVED PRODUCTION OF HGF ISOFORM POLYPEPTIDES
      [0072] i. TISSUE PLASMINOGEN ACTIVATOR
      [0073] ii. TPA-HGF INTRON FUSION PROTEIN FUSIONS
   [0074] b. CHIMERIC AND SYNTHETIC INTRON FUSION POLYPEPTIDES
   [0075] c. HGF MULTIMERS AND MULTIMERIZATION DOMAINS
      [0076] i. PEPTIDE LINKERS
      [0077] ii. POLYPEPTIDE MULTIMERIZATION DOMAINS
         [0078] (a) IMMUNOGLOBULIN DOMAIN
         [0079] (i) FC DOMAIN
         [0080] (ii) PROTUBERANCES-INTO-CAVITY (I.E. KNOBS AND HOLES)
         [0081] (b) LEUCINE ZIPPERS
         [0082] (i) FOS AND JUN
         [0083] (ii) GCN4
         [0084] (c) OTHER MULTIMERIZATION DOMAINS R/PKA-AD/AKAP
   [0085] d. METHODS OF GENERATING AND CLONING HGF FUSIONS
[0086] 2. TARGETING AGENT/TARGETING AGENT CONJUGATES
[0087] 3. PEPTIDOMIMETIC ISOFORMS

[0088] H. METHODS FOR ALTERING SERUM HALF-LIFE AND OTHER THERAPEUTIC PROPERTIES
[0089] 1. N-LINKED AND O-LINKED GLYCOSYLATION
[0090] 2. EFFECTS OF GLYCOSYLATION
[0091] 3. THERAPEUTIC USES FOR GLYCOSYLATION
[0092] 4. USE OF CD45 FOR ALTERING SERUM HALF-LIFE
   [0093] a. CD45 FUNCTION
   [0094] b. CD45 DIMERIZATION AND GLYCOSYLATION
   [0095] c. CD45 FUSION PROTEINS
   [0096] d. CONJUGATES OF CD45 FUSION PROTEINS
   [0097] e. THERAPEUTIC CD45 FUSION PROTEINS
   [0098] f. METHODS FOR MEASURING GLYCOSYLATION
   [0099] g. METHODS OF PRODUCTION AND INCREASING GLYCOSYLATION
   [0100] h. HGF-CD45 FUSION PROTEINS AND THERAPEUTIC USES

[0101] I. METHODS OF PREPARING AND ISOLATING HGF ISOFORM-SPECIFIC ANTIBODIES

[0102] J. ASSAYS TO ASSESS OR MONITOR HGF ISOFORM ACTIVITIES
[0103] 1. LIGAND BINDING ASSAYS AND HGF BINDING ASSAYS
[0104] 2. LIGAND DIMERIZATION
[0105] 3. COMPLEXATION
[0106] 4. MET AND ERK1/2 PHOSPHORYLATION ASSAYS
[0107] 5. MORPHOGENIC/ANGIOGENIC ASSAYS
[0108] 6. MITOGENIC/PROLIFERATION ASSAYS
[0109] 7. MOTOGENIC/CELL MIGRATION ASSAYS
[0110] 8. APOPTOTIC ASSAYS
[0111] 9. ANIMAL MODELS
   [0112] a. TUMOR SUPPRESSION ASSAYS
   [0113] b. ANGIOGENIC DISEASE

[0114] K. PREPARATION, FORMULATION AND ADMINISTRATION OF HGF ISOFORMS AND HGF ISOFORM COMPOSITIONS

[0115] L. IN VIVO EXPRESSION OF HGF ISOFORMS AND GENE THERAPY
[0116] 1. DELIVERY OF HGF
   [0117] a. VECTORS—EPISOMAL AND INTEGRATING
   [0118] b. ARTIFICIAL CHROMOSOMES AND OTHER NON-VIRAL VECTOR DELIVERY METHODS
   [0119] c. LIPOSOMES AND OTHER ENCAPSULATED FORMS AND ADMINISTRATION OF CELLS CONTAINING THE NUCLEIC ACID MOLECULES
[0120] 2. IN VITRO AND EX VIVO DELIVERY
[0121] 3. SYSTEMIC, LOCAL AND TOPICAL DELIVERY

[0122] M. HGF AND CANCER AND ANGIOGENESIS
[0123] 1. TUMOR GROWTH AND METASTASIS
   [0124] a. MITOGENESIS
   [0125] b. MOTOGENESIS AND MORPHOGENESIS
[0126] 2. ANGIOGENESIS
   [0127] a. THE ANGIOGENIC PROCESS
   [0128] b. CELL SURFACE RECEPTORS IN ANGIOGENESIS
   [0129] c. HGF IN TUMOR ANGIOGENESIS
   [0130] d. HGF IN OTHER VASCULAR DISEASES
[0131] 3. HGF ISOFORMS AND CANCER AND ANGIOGENESIS

[0132] N. EXEMPLARY TREATMENTS WITH HGF ISOFORMS
[0133] 1. CANCER
[0134] 2. ANGIOGENIC DISEASES
   [0135] a. ARTHRITIS AND CHRONIC INFLAMMATORY DISEASES
   [0136] b. OCULAR DISEASES
   [0137] c. ENDOMETRIOSIS
[0138] 3. MALARIA
[0139] 4. COMBINATION THERAPIES
[0140] 5. EVALUATION OF HGF ISOFORM ACTIVITIES

[0141] O. EXAMPLES

### A. Definitions

[0142] Unless defined otherwise, all technical and scientific terms used herein have the same meaning as is commonly understood by one of skill in the art to which the invention(s) belong. All patents, patent applications, published applications and publications, GENBANK sequences, websites and other published materials referred to throughout the entire disclosure herein, unless noted otherwise, are incorporated by reference in their entirety. In the event that there is a plurality of definitions for terms herein, those in this section prevail. Where reference is made to a URL or other such identifier or address, it is understood that such identifiers can change and particular information on the internet can come and go, but equivalent information is known and can be readily accessed, such as by searching the internet and/or appropriate databases. Reference thereto evidences the availability and public dissemination of such information.

[0143] As used herein, a ligand is an extracellular substance, generally a polypeptide, that binds to one or more receptors. A ligand can be soluble or can be a transmembrane protein. For purposes herein, a ligand binds to a receptor and induces signal transduction by the receptor.

[0144] As used herein, signal transduction refers to a series of sequential events, such as protein phosphorylations, consequent upon binding of ligand by a transmembrane cell surface receptor, that transfer a signal through a series of intermediate molecules until final regulatory molecules, such as transcription factors, are modified in response to the signal. Responses triggered by signal transduction include the activation of specific genes. Gene activation leads to further effects, since genes are expressed as proteins, many of which are enzymes, transcription factors, or other regulators of metabolic activity that mediate any one or more biological activities of a ligand-receptor interaction.

[0145] As used herein, hepatocyte growth factor (HGF) refers to a ligand of the MET receptor that induces mitogenesis, morphogenesis, and motogenesis. Normally, HGF is involved in organogenesis and tissue regeneration in developing and mature tissues. In malignant tissues, HGF contributes to cancer progression by promoting the invasion, migration, and proliferation of tumor cells, thereby contributing to tumorigenesis. HGF also is an angiogenic factor contributing to cancer growth and spread, and other angiogenic diseases. As an example, a human HGF encodes a 728 amino acid residue ligand with a 31 amino acid signal peptide, an N-terminal domain between amino acid 34-124, a Kringle 1 domain between amino acids 128-206, a Kringle 2 domain between amino acids 241-288, a Kringle 3 domain between amino acids 305-383, a Kringle 4 domain between amino acids 391-469, and a serine protease domain between amino acids 495-728 (see e.g., FIG. 2, SEQ ID NO:3). The precursor protein is a monomer which is cleaved to generate a disulfide-linked heterodimer composed of a 69 kDa α-chain and a 34 kDa β-chain. The HGF gene is composed of 18 exons interrupted by 17 introns (see e.g., FIG. 1). An exemplary genomic sequence of HGF is set forth as SEQ ID NO:1. Alternative splice variants of HGF exist. Two known splice variants, NK1 and NK2, are truncated HGF isoforms that contain an N-terminal domain, and a Kringle 1 domain (NK1) or a Kringle 1 and a Kringle 2 domain (NK2). NK1 and NK2 are partial agonists of MET signaling. An engineered variant of HGF, termed NK4, has been generated by enzymatic cleavage of HGF and is an antagonist of HGF-MET signaling. HGF includes allelic variants of HGF including species variants and any one of the allelic variations of HGF set forth in SEQ ID NO:1. HGF is also found in different species besides human, including cow, dog, cat, mouse, rat, horse, or others. Exemplary species variants of HGF are set forth in any one of SEQ ID NOS: 246-251.

[0146] As used herein, a cell surface receptor (CSR) is a protein that is expressed on the surface of a cell and typically includes a transmembrane domain or other moiety that anchors it to the surface of a cell. As a receptor it binds to ligands that mediate or participate in an activity of the cell surface receptor, such as signal transduction or ligand internalization. Cell surface receptors include, but are not limited to, single transmembrane receptors and G-protein coupled receptors. Receptor tyrosine kinases, such as growth factor receptors, also are among such cell surface receptors.

[0147] As used herein, a receptor tyrosine kinase (RTK) refers to a protein, typically a glycoprotein, that is a member of the growth factor receptor family of proteins. Growth factor receptors are typically involved in cellular processes including cell growth, cell division, differentiation, metabolism and cell migration. RTKs also are known to be involved in cell proliferation, differentiation and determination of cell fate as well as tumor growth. RTKs have a conserved domain structure including an extracellular domain, a membrane-spanning (transmembrane) domain and an intracellular tyrosine kinase domain. Typically, the extracellular domain binds to a polypeptide growth factor or a cell membrane-associated molecule or other ligand. The tyrosine kinase domain is involved in positive and negative regulation of the receptor. An exemplary RTK is the MET receptor.

[0148] Dimerization of RTKs activates the catalytic tyrosine kinase domain of the receptor and tyrosine autophosphorylation. Autophosphorylation in the kinase domain maintains the tyrosine kinase domain in an activated state. Autophosphorylation in other regions of the protein influences interactions of the receptor with other cellular proteins. In some RTKs, ligand binding to the extracellular domain leads to dimerization of the receptor. In some RTKs, the receptor can dimerize in the absence of ligand. Dimerization also can be increased by receptor overexpression.

[0149] As used herein, an isoform refers to a protein that has an altered polypeptide structure compared to a full-length wildtype (predominant) form of the cognate protein due to a difference in the nucleic acid sequence and encoded polypeptide of the isoform compared to the corresponding protein. For purposes herein, isoforms include isoforms of a cell surface receptor (CSR) and isoforms of a ligand of a CSR. Generally an isoform provided herein lacks a domain or portion thereof (or includes insertions or both) sufficient to alter an activity, such as an enzymatic activity of a predominant form of the protein, or the structure of the protein. Reference herein to an isoform with altered activity refers to the alteration in an activity by virtue of the different structure or sequence of the isoform compared to a full-length or predominant form of the protein. With reference to an isoform, alteration of activity refers to a difference in activity between the particular isoforms and the predominant or wildtype form. Alteration of an activity includes an enhancement or a reduction of activity. In one embodiment, an alteration of an activity is a reduction in an activity; the reduction can be at least 0.1, 0.5, 1, 2, 3, 4, 5, or 10 fold compared to a wildtype and/or predominant form of the receptor. Typically, an activity is reduced 5, 10, 20, 50, 100 or 1000 fold or more. For example, a ligand can bind to a receptor and initiate or participate in signal transduction.

[0150] As used herein, a ligand isoform refers to a ligand that lacks a domain or portion of a domain or that has a disruption in a domain such as by the insertion of one or more amino acids compared to polypeptides of a wildtype or predominant form of the ligand. Typically such isoforms are encoded by alternatively spliced variants of the gene encoding the cognate receptor. Among the ligand isoforms provided herein are those that can bind to receptors but do not initiate signal transduction or initiate a reduced level of signal transduction. Such ligand isoforms act as ligand antagonists, and also process reduced activity as agonists compared to the wildtype ligand. A ligand isoform generally lacks a domain or portion thereof sufficient to alter an activity of a wildtype full-length and/or predominant form of the ligand, and/or modulates an activity of its receptor, or lacks a structural feature such as a domain. Such ligand isoforms, also include insertions and rearrangements. A ligand isoform includes those that exhibit activities that are altered from the corresponding wild-type ligand; for example, an isoform can include an alteration in a domain of the ligand so that it is unable to induce the dimerization of a receptor. In such an example, an isoform can compete for binding with a full-length wildtype ligand for its receptor, but reduce or inhibit signaling by the receptor. Generally, an activity is altered in an isoform at least 0.1, 0.5, 1, 2, 3, 4, 5, or 10 fold compared to a wildtype and/or predominant form of a ligand. Typically, an activity is altered by at least 2, 5, 10, 20, 50, 100, or 1000 fold or more. In one embodiment, alteration of an activity by a ligand isoform is a reduction in the activity compared to the predominant form of the ligand.

[0151] As used herein, a cell surface receptor (CSR) isoform, such as an isoform of a receptor tyrosine kinase, refers to a receptor that lacks a domain or portion thereof sufficient to alter or modulate an activity compared to a wildtype and/or predominant form of the receptor, or lacks a structural feature, such as a domain. A CSR isoform can include an isoform that has one or more biological activities that are altered from the receptor; for example, an isoform can include an alteration of the extracellular domain of p185-HER2, altering the isoform from a positively acting regulatory polypeptide of the receptor to a negatively acting regulatory polypeptide of the receptor, e.g. from a receptor domain into a ligand. Generally, an activity is altered in an isoform at least 0.1, 0.5, 1, 2, 3, 4, 5, or 10 fold compared to a wildtype and/or predominant form of the receptor. Typically, a activity is altered by at least 2, 5, 10, 20, 50, 100 or 1000 fold or more. In one embodiment, alteration of an activity is a reduction in the activity.

[0152] As used herein, an intron fusion protein refers to an isoform that lacks one or more domain(s) or portion of one or more domain(s). In addition, an intron fusion protein is encoded by nucleic acid molecules that contain one or more codons (with reference to the predominant or wildtype form of a protein), including stop codons, operatively linked to exon codons. The intron portion can be a stop codon, resulting in an intron fusion protein that ends at the exon intron junction. The activity of an intron fusion protein typically is different from the predominant form, generally by virtue of truncation(s), deletions and/or insertion of intron(s) amino acid residues. Such activities include changes in interaction with a receptor, or indirect changes that occur virtue of differences in interaction with a co-stimulating receptor or ligand, a receptor ligand or co-factor or other modulator of receptor activity. Intron fusion proteins isolated from cells or tissues or that have the sequence of such polypeptides isolated from cells or tissues, are “natural”. Those that do not occur naturally but that are synthesized or prepared by linking a molecule to an intron are referred to “synthetic” or “recombinant” or “combinatorial”. Included among intron fusion proteins are CSR isoforms or ligand isoforms that lack one or more domain(s) or a portion of one or more domain(s) resulting in an alteration of an activity of a cognate receptor or ligand by virtue of a change in the interaction between the intron fusion protein and its receptor or ligand or other interaction. Generally such isoforms are shortened compared to a wildtype or predominant form encoded by a CSR or ligand gene. They, however, can include insertions or other modifications in the exon portion and, thus, be of the same size or larger than the predominant form. Each, however, is encoded by a nucleic acid molecule that includes at least one codon (including stop codons) from an intron-encoded portion resulting either in truncation of the CSR or ligand isoform at the end of the exon or in an addition of one 2, 3, 4, 5, 8, 10, 15, 20, 25, 30, 35, 40, 45, 50, 55, 60, 65, 70, 75 and more amino acids encoded by an intron.

[0153] An intron fusion protein can be encoded by an alternatively spliced RNA and/or can be synthetically produced such as from RNA molecules identified in silico by identifying potential splice sites and then producing such molecules by recombinant methods. Typically, an intron fusion protein is shortened by the presence of one or more stop codons in an intron fusion protein-encoding RNA that are not present in the corresponding sequence of an RNA encoding a wildtype or predominant form of a corresponding polypeptide. If an intron includes an open reading frame in-frame with the exon portion, the intron encoded portion can be inserted in the polypeptide. Addition of amino acids and/or a stop codon results in an intron fusion protein that differs in size and sequence from a wildtype or predominant form of a polypeptide.

[0154] Intron fusion proteins for purposes herein include natural, combinatorial and synthetic intron fusion proteins. A natural intron fusion protein refers to a polypeptide that is encoded by an alternatively spliced RNA molecule that contains one or more amino acids encoded by an intron linked to one or more portions of the polypeptide encoded by one or more exons of a gene. Alternatively spliced mRNA is isolated or can be prepared synthetically by joining splice donor and acceptor sites in a gene. A natural intron fusion protein contains one or more amino acids or is truncated at the exon-intron junction because the intron contains a stop codon as the first codon. The natural intron fusion proteins generally occur in cells and/or tissues. Intron fusion proteins can be produced synthetically, for example based upon the sequence encoded by gene by identifying splice donor and acceptor sites and identifying possible encoded spliced variants. A combinatorial intron fusion protein refers to a polypeptide that is shortened compared to a wildtype or predominant form of a polypeptide. Typically, the shortening removes one or more domains or a portion thereof from a polypeptide such that an activity is altered. Combinatorial intron fusion proteins often mimic a natural intron fusion protein in that one or more domains or a portion thereof that is/are deleted in a natural intron fusion protein derived from the same gene or derived from a gene in a related gene family. Those that do not occur naturally but that are synthesized or prepared by linking a molecule to an intron such that the resulting construct modulates the activity of a CSR are “synthetic”.

[0155] As used herein, natural with reference to an intron fusion protein or a CSR or ligand isoform, refers to any protein, polypeptide or peptide or fragment thereof (by virtue of the presence of the appropriate splice acceptor/donor sites) that is encoded within the genome of an animal and/or is produced or generated in an animal or that could be produced from a gene. Natural intron fusion proteins include allelic variants and species variants. Intron fusion proteins can be modified post-translationally.

[0156] As used herein, an exon refers to a nucleic acid molecule containing a sequence of nucleotides that is transcribed into RNA and is represented in a mature form of RNA, such as mRNA (messenger RNA), after splicing and other RNA processing. An mRNA contains one or more exons operatively linked. Exons can encode polypeptides or a portion of a polypeptide. Exons also can contain non-translated sequences, for example, translational regulatory sequences. Exon sequences are often conserved and exhibit homology among gene family members.

[0157] As used herein, an intron refers to a sequence of nucleotides that is transcribed into RNA and is then typically removed from the RNA by splicing to create a mature form of an RNA, for example, an mRNA. Typically, nucleotide sequences of introns are not incorporated into mature RNAs, nor are intron sequences or a portion thereof typically translated and incorporated into a polypeptide. Splice signal sequences such as splice donors and acceptors are used by the splicing machinery of a cell to remove introns from RNA. It is noteworthy that an intron in one splice variant can be an exon (i.e., present in the spliced transcript) in another variant. Hence, spliced mRNA encoding an intron fusion protein can include an exon(s) and introns.

[0158] As used herein, splicing refers to a process of RNA maturation where introns in the mRNA are removed and exons are operatively linked to create a messenger RNA (mRNA).

[0159] As used herein, alternative splicing refers to the process of producing multiple mRNAs from a gene. Alternative splicing can include operatively linking less than all the exons of a gene, and/or operatively linking one or more alternate exons or introns that are not present in all transcripts derived from a gene.

[0160] As used herein, exon deletion refers to an event of alternative RNA splicing that produces a nucleic acid molecule that lacks at least one exon compared to an RNA molecule encoding a wildtype or predominant form of a polypeptide. An RNA molecule that has a deleted exon can be produced by such alternative splicing or by any other method, such as an in vitro method to delete the exon.

[0161] As used herein, exon insertion, refers to an event of alternative RNA splicing that produces a nucleic acid molecule that contains at least one exon not typically present in an RNA molecule encoding a wildtype or predominant form of a polypeptide. An RNA molecule that has an inserted exon can be produced by such alternative splicing or by any other method, such as an in vitro method to add or insert the exon.

[0162] As used herein, exon extension refers to an event of alternative RNA splicing that produces a nucleic acid molecule that contains at least one exon that is greater in length (number of nucleotides contained in the exon) than the corresponding exon in an RNA encoding a wildtype or predominant form of a polypeptide. An RNA molecule that has an extended exon can be produced by such alternative splicing or by any other method, such as an in vitro method to extend the exon. In some instances, as described herein, an mRNA produced by exon extension encodes an intron fusion protein.

[0163] As used herein, exon truncation refers to an event of alternative RNA splicing that produces a nucleic acid molecule that contains a truncation or shortening of one or more exons such that the one or more exons are shorter in length (number of nucleotides) compared to a corresponding exon in an RNA molecule encoding a wildtype or predominant form of a polypeptide. An RNA molecule that has a truncated exon can be produced by such alternative splicing or by any other method, such as an in vitro method to truncate the exon.

[0164] As used herein intron retention refers to an event of alternative RNA splicing that produces a nucleic acid molecule that contains an intron or a portion thereof operatively linked to one or more exons. An RNA molecule that retains an intron or portion thereof (generally an intron portion that encodes 1, 2, 3, 4, 5, 6, 7, 8, 9, 10, 11, 12, 13, 14, 15, or more codons including only a stop codon) can be produced by such alternative splicing or by any other method, such as in vitro methods to produce an RNA molecule with a retained exon. In some cases, as described herein, an mRNA molecule produced by intron retention encodes an intron fusion protein.

[0165] As used herein, a gene, also referred to as a gene sequence, refers to a sequence of nucleotides transcribed into RNA (introns and exons), including a nucleotide sequence that encodes at least one polypeptide. A gene includes sequences of nucleotides that regulate transcription and processing of RNA. A gene also includes regulatory sequences of nucleotides such as promoters and enhancers, and translation regulation sequences.

[0166] As used herein, a cognate gene with reference to an encoded polypeptide provided herein refers to the gene sequence that encodes a predominant polypeptide and is the same gene as the particular isoform. For purposes herein a cognate gene can include a natural gene or a gene that is synthesized such as by using recombinant DNA techniques. Generally, the cognate gene also is a predominant form in a particular cell or tissue.

[0167] As used herein, a splice site refers to one or more nucleotides within the gene that participate in the removal of an intron and/or the joining of an exon. Splice sites include splice acceptor sites and splice donor sites.

[0168] As used herein, an open reading frame refers to a sequence of nucleotides that encodes a functional polypeptide or a portion thereof, typically at least about fifty amino acids. An open reading frame can encode a full-length polypeptide or a portion thereof. An open reading frame can be generated by operatively linking one or more exons or an exon and intron, when the stop codon is in the intron and all or a portion of the intron is in a transcribed mRNA.

[0169] As used herein, a polypeptide refers to two or more amino acids covalently joined. The terms “polypeptide” and “protein” are used interchangeably herein.

[0170] As used herein, truncation or shortening with reference to the shortening of a nucleic acid molecule or protein, refers to a sequence of nucleotides or amino acids that is less than full-length compared to a wildtype or predominant form of the protein or nucleic acid molecule.

[0171] As used herein, a reference gene refers to a gene that can be used to map introns and exons within a gene. A reference gene can be genomic DNA or a portion thereof, that can be compared with, for example, an expressed gene sequence, to map introns and exons in the gene. A reference gene also can be a gene encoding a wildtype or predominant form of a polypeptide.

[0172] As used herein, a premature stop codon is a stop codon occurring in the open reading frame of a sequence before the stop codon used to produce or create a full-length form of a protein, such as a wildtype or predominant form of a polypeptide. The occurrence of a premature stop codon can be the result of, for example, alternative splicing and mutation.

[0173] As used herein, an expressed gene sequence refers to any sequence of nucleotides transcribed or predicted to be transcribed from a gene. Expressed gene sequences include, but are not limited to, cDNAs, ESTs, and in silico predictions of expressed sequences, for example, based on splice site predictions and in silico generation of spliced sequences.

[0174] As used herein, an expressed sequence tag (EST) is a sequence of nucleotides generated from an expressed gene sequence. ESTs are generated by using a population of mRNA to produce cDNA. The cDNA molecules can be produced for example, by priming from the polyA tail present on mRNAs. cDNA molecules also can be produced by random priming using one or more oligonucleotides which prime cDNA synthesis internally in mRNAs. The generated cDNA molecules are sequenced and the sequences are typically stored in a database. An example of an EST database is dbEST found online at ncbi.nlm.nih.gov/dbEST. Each EST sequence is typically assigned a unique identifier and information such as the nucleotide sequence, length, tissue type where expressed, and other associated data is associated with the identifier.

[0175] As used herein, a cognate ligand with reference to the isoforms provided herein refers to the ligand that is encoded by the same gene as the particular isoform. Generally, the cognate ligand also is a predominant form in a particular cell or tissue.

[0176] As used herein, a wildtype form, for example, a wildtype form of a polypeptide, refers to a polypeptide that is encoded by a gene. Typically a wildtype form refers to a gene (or RNA or protein derived therefrom) without mutations or other modifications that alter function or structure; wildtype forms include allelic variation among and between species.

[0177] As used herein, a predominant form, for example, a predominant form of a polypeptide, refers to a polypeptide that is the major polypeptide produced from a gene. A “predominant form” varies from source to source. For example, different cells or tissue types can produce different forms of polypeptides, for example, by alternative splicing and/or by alternative protein processing. In each cell or tissue type, a different polypeptide can be a “predominant form”.

[0178] As used herein, a domain refers to a portion (typically a sequence of three or more, generally 5 or 7 or more amino acids) of a polypeptide chain that can form an independently folded structure within a protein made up of one or more structural motifs (e.g. combinations of alpha helices and/or beta strands connected by loop regions) and/or that is recognized by virtue of a functional activity, such as kinase activity. A protein can have one, or more than one, distinct domains. For example, a domain can be identified, defined or distinguished by homology of the sequence therein to related family members, such as homology to motifs that define an extracellular domain. In another example, a domain can be distinguished by its function, such as by enzymatic activity, e.g. kinase activity, or an ability to interact with a biomolecule, such as DNA binding, ligand binding, and dimerization. A domain independently can exhibit a biological function or activity such that the domain independently or fused to another molecule can perform an activity, such as, for example proteolytic activity or ligand binding. A domain can be a linear sequence of amino acids or a non-linear sequence of amino acids from the polypeptide. Many polypeptides contain a plurality of domains. For example, receptor tyrosine kinases typically include an extracellular domain, a membrane-spanning (transmembrane) domain and an intracellular tyrosine kinase domain.

[0179] As used herein, a polypeptide lacking all or a portion of a domain refers to a polypeptide that has a deletion of one or more amino acids or all of the amino acids of a domain compared to a cognate polypeptide. Amino acids deleted in a polypeptide lacking all or part of a domain can be contiguous, but need not be contiguous amino acids within the domain of the cognate polypeptide. Polypeptides that lack all or a part of a domain can exhibit a change, such as a loss or reduction of an activity of the polypeptide compared to the activity of a cognate polypeptide, or loss or addition of a structure in the polypeptide compared to a cognate polypeptide.

[0180] As used herein, a portion of a domain, such as a kringle domain, i.e. K4, or a sereine protease, i.e. SerP, includes at least one amino acid, typically, 2, 3, 4, 5, 6, 8, 10, 15 or more amino acids of the domain, but fewer than all of the amino acids that make up the domain. For example, if a cognate ligand has a Kringle domain, then a ligand isoform polypeptide lacking all or a part of the Kringle domain can have a deletion of 1, 2, 3, 4, 5, 6, 7, 8, 9, 10, 11, 12, 13, 14, 15, 16, 17, 18, 19, 20 or more amino acids of the amino acids corresponding to the same amino acid positions in the cognate ligand. Any isoform provided herein that contains such portion exhibits a desired activity such as, for example, modulation of the activity of a cell surface receptor.

[0181] As used herein, a polypeptide that contains a domain refers to a polypeptide that contains a complete domain with reference to the corresponding domain of a cognate ligand. A complete domain is determined with reference to the definition of that particular domain within a cognate polypeptide. For example, a ligand isoform comprising a domain refers to an isoform that contains a domain corresponding to the complete domain as found in the cognate ligand. If a cognate ligand, for example, contains a Kringle domain of 47 amino acids between amino acid positions 241-288, then a ligand isoform that comprises such Kringle domain, contains a 47 amino acid domain that has substantial identity with the 47 amino acid domain of the cognate ligand. Substantial identity refers to a domain that can contain allelic variation and conservative substitutions compared to the domain of the cognate ligand. Domains that are substantially identical do not have deletions, non-conservative substitutions or insertions of amino acids compared to the domain of the cognate ligand. Domains (i.e., a Kringle domain, a Serine Protease domain) often are identified by virtue of structural and/or sequence homology to domains in particular proteins.

[0182] Such domains are known to those of skill in the art who can identify such. For exemplification herein, definitions are provided, but it is understood that it is well within the skill in the art to recognize particular domains by name. If needed appropriate software can be employed to identify domains.

[0183] As used herein, an N-terminal domain belongs to the PAN module superfamily of domains which also includes the apple domains of the plasma prekallikrein/coagulation factor XI family, and domains of various nematode proteins. The PAN domain module contains a conserved core of three disulphide bridges. In some members of the family there is an additional fourth disulphide bridge that links the N and C termini of the domain. The domain is found in diverse proteins. In some the domain mediates protein-protein interactions, in others it mediates protein-carbohydrate interactions. HGF contains an N-terminal domain which binds to the MET receptor and to the heparin molecule. The structure of the N-terminal domain of HGF contains a characteristic hairpin-loop structure stabilized by two disulfide bridges.

[0184] As used herein, a kringle domain contains about 80 amino acids and has a characteristic folding pattern defined by three internal disulfide bonds and additional conserved residues. Generally, kringle domains are involved in protein-protein interactions. An exemplary HGF provided herein as set forth in SEQ ID NO:3 contains four kringle domains.

[0185] As used herein, a serine protease domain refers generally to a large group of peptidases which share a common closed beta barrel structure. Typically, a protease domain is the catalytically active portion of a protease. A protease domain of a protein contains all of the requisite properties of that protein required for its proteolytic activity, such as for example, its catalytic center. The catalytic center of a serine protease is a catalytic triad of three amino acids, an aspartic acid, a histidine, and a serine. In the exemplary HGF provided herein, residues in the catalytic triad are mutated such that the protein does not have proteolytic activity.

[0186] As used herein, an allelic variant or allelic variation refers to a polypeptide encoded by a gene that differs from a reference form of a gene (i.e. is encoded by an allele) among a population. Typically the reference form of the gene encodes a wildtype form and/or predominant form of a polypeptide from a population or single reference member of a species. Typically, allelic variants have at least 80%, 90%, 95% or greater amino acid identity with a wildtype and/or predominant form from the same species.

[0187] As used herein, species variants refers to variants of the same polypeptide between and among species. Generally, interspecies allelic variants have at least about 60%, 70%. 80%, 85%, 90% or 95% identity or greater with a wildtype and/or predominant form of another species, including 96%, 97%, 98%, 99% or greater identity with a wildtype and/or predominant form of a polypeptide.

[0188] As used herein, modification refers to modification of a sequence of amino acids of a polypeptide or a sequence of nucleotides in a nucleic acid molecule and includes deletions, insertions, and replacements of amino acids and nucleotides, respectively.

[0189] As used herein, designated refers to the selection of a molecule or portion thereof as a point of reference or comparison. For example, a domain can be selected as a designated domain for the purpose of constructing polypeptides that are modified within the selected domain. In another example, an intron can be selected as a designated intron for the purpose of identifying RNA transcripts that include or exclude the selected intron.

[0190] As used herein, an agonist refers to a molecule that elicits a maximal response by a receptor.

[0191] As used herein, a partial agonist refers to a molecule that elicits a response by a receptor, however, the maximum response obtained is less that that of an agonist (e.g., the physiological ligand).

[0192] As used herein, an antagonist or competitive antagonist refers to a molecule that competes with a wildtype or predominant ligand for receptor binding, without itself leading to activation of the receptor.

[0193] As used herein, a ligand antagonist refers to the activity of an isoform that antagonizes an activity that results from ligand interaction with a CSR.

[0194] As used herein, inhibit and inhibition refer to a reduction in an activity, such as a biological activity, relative to the uninhibited activity.

[0195] As used herein, an activity refers to a function or functioning or changes in or interactions of a biomolecule, such as polypeptide. Exemplary, but not limiting of such activities are: complexation, dimerization, multimerization, receptor-associated kinase activity or other enzymatic or catalytic activity, phosphorylation, dephosphorylation, autophosphorylation, ability to form complexes with other molecules, ligand binding, catalytic or enzymatic activity, activation including auto-activation and activation of other polypeptides, inhibition or modulation of another molecule's function, stimulation or inhibition of signal transduction and/or cellular responses such as cell proliferation (mitogenesis), migration (motogenesis), differentiation (morphogenesis), angiogenesis, growth, degradation, membrane localization, membrane binding, and oncogenesis. An activity can be assessed by assays described herein and by any suitable assays known to those of skill in the art, including, but not limited to, in vitro assays, including cell-based assays, in vivo assays, including assays in animal models for particular diseases. Biological activities refer to activities exhibited in vivo. For purposes herein, biological activity refers to any of the activities exhibited by a polypeptide provided herein.

[0196] As used herein, complexation refers to the interaction of two or more molecules such as two molecules of a protein to form a complex. The interaction can be by noncovalent and/or covalent bonds and includes, but is not limited to, hydrophobic and electrostatic interactions, Van der Waals forces and hydrogen bonds. Generally, protein-protein interactions involve hydrophobic interactions and hydrogen bonds. Complexation can be influenced by environmental conditions such as temperature, pH, ionic strength and pressure, as well as protein concentrations.

[0197] As used herein, dimerization refers to the interaction of two molecules of the same type, such as two molecules of a receptor. Dimerization includes homodimerization where two identical molecules interact. Dimerization also includes heterodimerization of two different molecules, such as two subunits of a receptor and dimerization of two different receptor molecules. Typically, dimerization involves two molecules that interact with each other through interaction of a dimerization domain contained in each molecule.

[0198] As used herein, mitogenesis refers to a process by which an agent induces mitosis and cell proliferation.

[0199] As used herein, motogenesis refers to the process of regulating cell movement or migration and generally implies regulated movement of a population of cells from one place to another.

[0200] As used herein, morphogenesis refers to the differentiation and growth of cells, tissues or organs. Differentiation can occur during the formation of the structure of an organism or part, such as during organogenesis. Differentiation can also occur at the cellular level, such as when a cell undergoes a change toward a more specialized form or function.

[0201] As used herein, angiogenesis refers to the formation of new blood vessels.

[0202] As used herein, an “anti-angiogenic” or “angio-inhibitory” molecule refers to a molecule that inhibits angiogenesis.

[0203] As used herein, modulate and modulation refer to a change of an activity of a molecule, such as a protein. Exemplary activities include, but are not limited to, activities such as signal transduction and protein phosphorylation. Modulation can include an increase in the activity (i.e., up-regulation of agonist activity), a decrease in activity (i.e., down-regulation or inhibition) or any other alteration in an activity (such as in periodicity, frequency, duration and kinetics.) Modulation can be context dependent and typically modulation is compared to a designated state, for example, the wildtype protein, the protein in a constitutive state, or the protein as expressed in a designated cell type or condition.

[0204] As used herein, reference to modulating the activity of a cell surface receptor means that a CSR or ligand isoform interacts in some manner with the receptor, whereby an activity, such as, but not limited to ligand binding, dimerization and/or other signal-transduction-related activity, is altered.

[0205] As used herein, reference to a ligand isoform, including an HGF isoform, with altered activity refers to an alteration in an activity by virtue of the different structure or sequence of the CSR or ligand isoform compared to a cognate receptor or ligand.

[0206] As used herein, a composition refers to any mixture. It can be a solution, a suspension, liquid, powder, a paste, aqueous, non-aqueous or any combination thereof.

[0207] As used herein, a combination refers to any association between or among two or more items. The combination can be two or more separate items, such as two compositions or two collections, can be a mixture thereof, such as a single mixture of the two or more items, or any variation thereof. The elements of a combination are generally functionally associated or related. A kit is a packaged combination that optionally includes instructions for use of the combination or elements thereof and/or optionally includes other reagents and vessels and tools and devices employed in the methods for which the kit is intended.

[0208] As used herein, a pharmaceutical effect refers to an effect observed upon administration of an agent intended for treatment of a disease or disorder or for amelioration of the symptoms thereof.

[0209] As used herein, treatment means any manner in which the symptoms of a condition, disorder or disease or other indication, are ameliorated or otherwise beneficially altered.

[0210] As used herein, a disease involving HGF or an HGF-mediated disease refers to any disease in which HGF plays a role, whereby, modulation of its activity would effect treatment of the disease or a symptom of the disease. Included among HGF-mediated diseases are MET-mediated diseases involving HGF-MET signaling, as well as other angiogenic diseases involving signaling by other CSRs, including FGFR or VEGFR. Exemplary of such diseases include cancers and other diseases involving undesirable cell proliferation, angiogenic and inflammatory reactions or responses.

[0211] As used herein therapeutic effect means an effect resulting from treatment of a subject that alters, typically improves or ameliorates the symptoms of a disease or condition or that cures a disease or condition. A therapeutically effective amount refers to the amount of a composition, molecule or compound which results in a therapeutic effect following administration to a subject.

[0212] As used herein, the term “subject” refers to animals, including mammals, such as human beings.

[0213] As used herein, a patient refers to a human subject.

[0214] As used herein, angiogenic diseases (or angiogenesis-related diseases) are diseases in which the balance of angiogenesis is altered or the timing thereof is altered. Angiogenic diseases include those in which an alteration of angiogenesis, such as undesirable vascularization, occurs. Such diseases include, but are not limited to, cell proliferative disorders, including cancers, diabetic retinopathies and other diabetic complications, inflammatory diseases, endometriosis and other diseases in which excessive vascularization is part of the disease process, including those noted above.

[0215] As used herein, in silico refers to research and experiments performed using a computer. In silico methods include, but are not limited to, molecular modeling studies, biomolecular docking experiments, and virtual representations of molecular structures and/or processes, such as molecular interactions.

[0216] As used herein, biological sample refers to any sample obtained from a living or viral source or other source of macromolecules and biomolecules, and includes any cell type or tissue of a subject from which nucleic acid or protein or other macromolecule can be obtained. The biological sample can be a sample obtained directly from a biological source or to a sample that is processed For example, isolated nucleic acids that are amplified constitute a biological sample. Biological samples include, but are not limited to, body fluids, such as blood, plasma, serum, cerebrospinal fluid, synovial fluid, urine and sweat, tissue and organ samples from animals and plants and processed samples derived therefrom. Also included are soil and water samples and other environmental samples, viruses, bacteria, fungi, algae, protozoa and components thereof.

[0217] As used herein, macromolecule refers to any molecule having a molecular weight from the hundreds up to the millions. Macromolecules include peptides, proteins, nucleotides, nucleic acids, and other such molecules that are generally synthesized by biological organisms, but can be prepared synthetically or using recombinant molecular biology methods.

[0218] As used herein, a biomolecule is any compound found in nature, or derivatives thereof. Exemplary biomolecules include but are not limited to: oligonucleotides, oligonucleosides, proteins, peptides, amino acids, peptide nucleic acids (PNAs), oligosaccharides and monosaccharides.

[0219] As used herein, the term “nucleic acid” refers to single-stranded and/or double-stranded polynucleotides such as deoxyribonucleic acid (DNA), and ribonucleic acid (RNA) as well as analogs or derivatives of either RNA or DNA. Also included in the term “nucleic acid” are analogs of nucleic acids such as peptide nucleic acid (PNA), phosphorothioate DNA, and other such analogs and derivatives or combinations thereof. Nucleic acid can refer to polynucleotides such as deoxyribonucleic acid (DNA) and ribonucleic acid (RNA). The term also includes, as equivalents, derivatives, variants and analogs of either RNA or DNA made from nucleotide analogs, single (sense or antisense) and double-stranded polynucleotides. Deoxyribonucleotides include deoxyadenosine, deoxycytidine, deoxyguanosine and deoxythymidine. For RNA, the uracil base is uridine.

[0220] As used herein, the term “polynucleotide” refers to an oligomer or polymer containing at least two linked nucleotides or nucleotide derivatives, including a deoxyribonucleic acid (DNA), a ribonucleic acid (RNA), and a DNA or RNA derivative containing, for example, a nucleotide analog or a “backbone” bond other than a phosphodiester bond, for example, a phosphotriester bond, a phosphoramidate bond, a phophorothioate bond, a thioester bond, or a peptide bond (peptide nucleic acid). The term “oligonucleotide” also is used herein essentially synonymously with “polynucleotide”, although those in the art recognize that oligonucleotides, for example, PCR primers, generally are less than about fifty to one hundred nucleotides in length.

[0221] Polynucleotides can include nucleotide analogs, including, for example, mass modified nucleotides, which allow for mass differentiation of polynucleotides; nucleotides containing a detectable label such as a fluorescent, radioactive, luminescent or chemiluminescent label, which allow for detection of a polynucleotide; or nucleotides containing a reactive group such as biotin or a thiol group, which facilitates immobilization of a polynucleotide to a solid support. A polynucleotide also can contain one or more backbone bonds that are selectively cleavable, for example, chemically, enzymatically or photolytically. For example, a polynucleotide can include one or more deoxyribonucleotides, followed by one or more ribonucleotides, which can be followed by one or more deoxyribonucleotides, such a sequence being cleavable at the ribonucleotide sequence by base hydrolysis. A polynucleotide also can contain one or more bonds that are relatively resistant to cleavage, for example, a chimeric oligonucleotide primer, which can include nucleotides linked by peptide nucleic acid bonds and at least one nucleotide at the 3′ end, which is linked by a phosphodiester bond or other suitable bond, and is capable of being extended by a polymerase. Peptide nucleic acid sequences can be prepared using well-known methods (see, for example, Weiler et al. Nucleic acids Res. 25: 2792-2799 (1997)).

[0222] As used herein, synthetic, in the context of a synthetic sequence and synthetic gene refers to a nucleic acid molecule that is produced by recombinant methods and/or by chemical synthesis methods.

[0223] As used herein, oligonucleotides refer to polymers that include DNA, RNA, nucleic acid analogues, such as PNA, and combinations thereof. For purposes herein, primers and probes are single-stranded oligonucleotides or are partially single-stranded oligonucleotides.

[0224] As used herein, primer refers to an oligonucleotide containing two or more deoxyribonucleotides or ribonucleotides, generally more than three, from which synthesis of a primer extension product can be initiated. Experimental conditions conducive to synthesis include the presence of nucleoside triphosphates and an agent for polymerization and extension, such as DNA polymerase, and a suitable buffer, temperature and pH.

[0225] As used herein, production by recombinant means by using recombinant DNA methods refers to the use of the well-known methods of molecular biology for expressing proteins encoded by cloned DNA.

[0226] As used herein, “isolated”, with reference to a molecule, such as a nucleic acid molecule, oligonucleotide, polypeptide or antibody, indicates that the molecule has been altered by the hand of man from how it is found in its natural environment. For example, a molecule produced by and/or contained within a recombinant host cell is considered “isolated”. Likewise, a molecule that has been purified, partially or substantially, from a native source or recombinant host cell, or produced by synthetic methods, is considered “isolated”. Depending on the intended application, an isolated molecule can be present in any form, such as in an animal, cell or extract thereof; dehydrated, in vapor, solution or suspension; or immobilized on a solid support.

[0227] As used herein, the term “vector” refers to a nucleic acid molecule capable of transporting another nucleic acid to which it has been linked. One type of vector is an episome, i.e., a nucleic acid capable of extra chromosomal replication. Vectors include those capable of autonomous replication and/or expression of nucleic acids to which they are linked. Vectors capable of directing the expression of genes to which they are operatively linked are referred to herein as “expression vectors”. In general, expression vectors are often in the form of “plasmids,” which are generally circular double stranded DNA loops that, in their vector form, are not bound to the chromosome. “Plasmid” and “vector” are used interchangeably as the plasmid is the most commonly used form of vector. Other forms of expression vectors include those that serve equivalent functions and that become known in the art subsequently hereto.

[0228] As used herein, “transgenic animal” refers to any animal, generally a non-human animal, e.g., a mammal, bird or an amphibian, in which one or more of the cells of the animal contain heterologous nucleic acid introduced by way of human intervention, such as by transgenic techniques well known in the art. The nucleic acid is introduced into the cell, directly or indirectly by introduction into a precursor of the cell, by way of deliberate genetic manipulation, such as by microinjection or by infection with a recombinant virus. This molecule can be stably integrated within a chromosome, i.e., replicate as part of the chromosome, or it can be extrachromosomally replicating DNA. In the typical transgenic animals, the transgene causes cells to express a recombinant form of a protein.

[0229] As used herein, a reporter gene construct is a nucleic acid molecule that includes a nucleic acid encoding a reporter operatively linked to transcriptional control sequences. Transcription of the reporter gene is controlled by these sequences. The activity of at least one or more of these control sequences is directly or indirectly regulated by another molecule such as a cell surface protein, a protein or small molecule involved in signal transduction within the cell. The transcriptional control sequences include the promoter and other regulatory regions, such as enhancer sequences, that modulate the activity of the promoter, or control sequences that modulate the activity or efficiency of the RNA polymerase. Such sequences are herein collectively referred to as transcriptional control elements or sequences. In addition, the construct can include sequences of nucleotides that alter translation of the resulting mRNA, thereby altering the amount of reporter gene product.

[0230] As used herein, “reporter” or “reporter moiety” refers to any moiety that allows for the detection of a molecule of interest, such as a protein expressed by a cell, or a biological particle. Typical reporter moieties include, for example, fluorescent proteins, such as red, blue and green fluorescent proteins (see, e.g., U.S. Pat. No. 6,232,107, which provides GFPs from Renilla species and other species), the lacZ gene from E. coli, alkaline phosphatase, chloramphenicol acetyl transferase (CAT) and other such well-known genes. For expression in cells, nucleic acid encoding the reporter moiety, referred to herein as a “reporter gene”, can be expressed as a fusion protein with a protein of interest or under to the control of a promoter of interest.

[0231] As used herein, the phrase “operatively linked” with reference to sequences of nucleic acids means the nucleic acid molecules or segments thereof are covalently joined into one piece of nucleic acid such as DNA or RNA, whether in single or double stranded form. The segments are not necessarily contiguous, rather two or more components are juxtaposed so that the components are in a relationship permitting them to function in their intended manner. For example, segments of RNA (exons) can be operatively linked such as by splicing, to form a single RNA molecule. In another example, DNA segments can be operatively linked, whereby control of regulatory sequences on one segment control expression or replication or other such control of other segments. Thus, in the case of a regulatory region operatively linked to a reporter or any other polynucleotide, or a reporter or any polynucleotide operatively linked to a regulatory region, expression of the polynucleotide/reporter is influenced or controlled (e.g., modulated or altered, such as increased or decreased) by the regulatory region. For gene expression, a sequence of nucleotides and a regulatory sequence(s) are connected in such a way as to control or permit gene expression when the appropriate molecular signal, such as transcriptional activator proteins, are bound to the regulatory sequence(s). Operative linkage of heterologous nucleic acid, such as DNA, to regulatory and effector sequences of nucleotides, such as promoters, enhancers, transcriptional and translational stop sites, and other signal sequences, refers to the relationship between such DNA and such sequences of nucleotides. For example, operative linkage of heterologous DNA to a promoter refers to the physical relationship between the DNA and the promoter such that the transcription of such DNA is initiated from the promoter by an RNA polymerase that specifically recognizes, binds to and transcribes the DNA in reading frame.

[0232] As used herein, the term “operatively linked” with reference to amino acids in polypeptides refers to covalent linkage (direct or indirect) of the amino acids. For example, at least one domain of a ligand, such as HGF, operatively linked to at least one amino acid encoded by an intron of a gene encoding a ligand, means that the amino acids of a domain from a ligand are covalently joined to amino acids encoded by an intron from a ligand gene. Such linkage, typically direct via peptide bonds, also can be effected indirectly, such as via a linker or via non-peptidic linkage. Hence, a polypeptide that contains at least one domain of a ligand operatively linked to at least one amino acid encoded by an intron of a gene encoding a cell surface receptor can be an intron fusion protein. Nucleic acids encoding such polypeptides can be produced when an intron sequence is spliced or otherwise covalently joined in-frame to an exon sequence that encodes a domain of a cell surface receptor. Translation of the nucleic acid molecule produces a polypeptide where an intron-encoded portion of amino acid(s), minimally containing a stop codon encoded by the intron sequence, are covalently joined to a domain of the ligand. They also can be produced synthetically by linking a portion containing an exon to a portion containing an intron, including chimeric intron fusion proteins in which the exon is encoded by a gene for a different isoform, including a different ligand isoform or cell surface receptor isoform, from the intron portion or vice versa.

[0233] As used herein, the phrase “generated from a nucleic acid” in reference to the generation of a polypeptide, such as an isoform and intron fusion protein, includes the literal generation of a polypeptide molecule and the generation of an amino acid sequence of a polypeptide from translation of the nucleic acid sequence into a sequence of amino acids.

[0234] As used herein, a conjugate refers to the joining together of a nucleic acid or polypeptide. Conjugation can be effected directly or indirectly. In some examples, linkers can be used such as peptide linkers, restriction enzyme linkers, or other linkers. Conjugation can also be effected chemically, such as by using heterobifunctional cross-linking reagents.

[0235] As used herein, cross-linking refers to the process of chemically joining two or more molecules by a covalent bond. Cross-linking reagents contain reactive ends to specific functional groups (primary amines, sulfhydryls, etc.) on proteins or other molecules. Cross-linkers include homo- and heterobifunctional cross-linkers. Homobifunctional cross-linkers have two identical reactive groups and often are used in one-step reaction procedures to cross-link proteins to each other or to stabilize quaternary structure. Heterobifunctional cross-linkers possess two different reactive groups that allow for sequential (two-stage) conjugations, helping to minimize undesirable polymerization or self-conjugation.

[0236] As used herein, a fusion protein refers to a protein created through recombinant DNA techniques and is achieved by operatively linking all or part of the nucleic acid sequence of one gene with all or part of the nucleic acid sequence of another gene. In some cases, a fusion can encode a chimeric protein containing two or more proteins or peptides.

[0237] As used herein, production with reference to a polypeptide refers to expression and recovery of an expressed protein (or recoverable or isolatable expressed protein). Factors that can influence the production of a protein include the expression system and host cell chosen, the cell culture conditions, the secretion of the protein by the host cell, and ability to detect a protein for purification purposes. Production of a protein can be monitored by assessing the secretion of a protein, such as for example, into cell culture medium.

[0238] As used herein, “improved production” refers to an increase in the production of a polypeptide compared to production of a control polypeptide. For example, production of an isoform fusion protein is compared to a corresponding isoform that is not a fusion protein or that contains a different fusion. For example, the production of an isoform containing a tPA pre/prosequence can be compared to an isoform containing its endogenous signal sequence. Generally, production of a protein can be improved more than, about or at least 1, 1.5, 2, 3, 4, 5, 6, 7, 8, 9 10 fold and more. Typically, production of a protein can be improved by 5, 10, 20, 30, 40, 50 fold or more compared to a corresponding isoform that is not an isoform fusion or does not contain the same fusion.

[0239] As used herein, secretion refers to the process by which a protein is transported into the external cellular environment or, in the case of gram-negative bacteria, into the periplasmic space. Generally, secretion occurs through a secretory pathway in a cell, for example, in eukaryotic cells this involves the endoplasmic reticulum and golgi apparatus.

[0240] As used herein, a “precursor sequence” or “precursor peptide” or “precursor polypeptide” refers to a sequence of amino acids, that is processed, and that occurs at a terminus, typically at the amino terminus, of a polypeptide prior to processing or cleavage. The precursor sequence includes sequences of amino acids that effect secretion and/or trafficking of the linked polypeptide. The precursor sequence can include one or more functional portions. For example, it can include a presequence (a signal polypeptide) and/or a prosequence. Processing of a polypeptide into a mature polypeptide results in the cleavage of a precursor sequence from a polypeptide. The precursor sequence, when it includes a presequence and a prosequence also can be referred to as a pre/prosequence.

[0241] As used herein, a “presequence”, “signal sequence”, “signal peptide”, “leader sequence” or “leader peptide” refers to a sequence of amino acids at the amino terminus of nascent polypeptides, which target proteins to the secretory pathway and are cleaved from the nascent chain once translocated in the endoplasmic reticulum membrane.

[0242] As used herein, a prosequence refers to a sequence encoding a propeptide which, when it is linked to a polypeptide, can exhibit diverse regulatory functions including, but not limited to, contributing to the correct folding and formation of disulfide bonds of a mature polypeptide, contributing to the activation of a polypeptide upon cleavage of the pro-peptide, and/or contributing as recognition sites. Generally, a pro-sequence is cleaved off within the cell before secretion, although it also can be cleaved extracellularly by exoproteases. In some examples, a pro-sequence is autocatalytically cleaved while in other examples another polypeptide protease cleaves a pro-sequence.

[0243] As used herein, homologous refers to a molecule, such as a nucleic acid molecule or polypeptide, from different species that correspond to each other and that are identical or very similar to each other (i.e., are homologs).

[0244] As used herein, heterologous refers to a molecule, such as a nucleic acid or polypeptide, that is unique in activity or sequence. A heterologous molecule can be derived from a separate genetic source or species. For purposes herein, a heterologous molecule is a protein or polypeptide, regardless of origin, other than a CSR or ligand isoform, or allelic variants thereof. Thus, molecules heterologous to a CSR or ligand isoform include any molecule containing a sequence that is not derived from, endogenous to, or homologous to the sequence of a CSR or ligand isoform. Examples of heterologous molecules of interest herein include secretion signals from a different polypeptide of the same or different species, a tag such as a fusion tag or label, or all or part of any other molecule that is not homologous to and whose sequence is not the same as that of a CSR isoform or ligand. A heterologous molecule can be fused to a nucleic acid or polypeptide sequence of interest for the generation of a fusion or chimeric molecule.

[0245] As used herein, a heterologous secretion signal refers to the a signal sequence from a polypeptide, from the same or different species, that is different in sequence from the signal sequence of a CSR or ligand isoform. A heterologous secretion signal can be used in a host cell from which it is derived or it can be used host cells that differ from the cells from which the signal sequence is derived.

[0246] As used herein, an endogenous precursor sequence or endogenous signal sequence refers to the naturally occurring signal sequence associated with all or part of a polypeptide. The approximate location of signal sequence of CSR and ligand isoforms, based on their corresponding cognate receptor or ligand signal sequence, are known to one of skill in the art. The C-terminal boundary of a signal peptide may vary, however, typically by no more than about 5 amino acids on either side of the signal peptide C-terminal boundary. Algorithms are available and known to one of skill in the art to identify signal sequences and predict their cleavage site (see e.g., Chou et al., (2001), Proteins 42:136; McGeoch et al., (1985) Virus Res. 3:271; von Heijne et al., (1986) Nucleic Acids Res. 14:4683).

[0247] As used herein, tissue plasminogen activator (tPA) refers to an extrinsic (tissue-type) plasminogen activator having fibrinolytic activity and typically having a structure with five domains (finger, growth factor, kringle-1, kringle-2, and protease domains). Mammalian t-PA includes t-PA from any animals, including humans. Other species include, but are not limited to, rabbit, rat, porcine, non human primate, equine, murine, dog, cat, bovine and ovine tPA. Nucleic acid encoding tPA including the precursor polypeptide(s) from human and non-human species is known in the art.

[0248] As used herein, a tPA precursor sequence refers to a sequence of amino acid residues that includes the presequence and prosequence from tPA (i.e., is a pre/prosequence, see e.g., U.S. Pat. No. 6,693,181 and U.S. Pat. No. 4,766,075). This polypeptide is naturally associated with tPA and acts to direct the secretion of a tPA from a cell. An exemplary precursor sequence for tPA is set forth in SEQ ID NO:253 and encoded by a nucleic acid sequence set forth in SEQ ID NO:252. The precursor sequence includes the signal sequence (amino acids 1-23) and a prosequence (amino acids 24-35). The prosequence includes two protease cleavage sites: one after residue 32 and another after residue 35. Exemplary species variants of precursor sequences are set forth in any one of SEQ ID NOS: 258-265; exemplary nucleotide and amino acid allelic variants are set forth in SEQ ID NOS:256 or 257.

[0249] As used herein, all or a portion of a tPA precursor sequence refers to any contiguous portion of amino acids of a tPA precursor sequence sufficient to direct processing and/or secretion of tPA from a cell. All or a portion of a precursor sequence can include all or a portion of a wildtype or predominant tPA precursor sequence such as set forth in SEQ ID NO:253 and encoded by SEQ ID NO:252, allelic variants thereof set forth in SEQ ID NO: 257, or species variants set forth in SEQ ID NOS:256-265. For example, for the exemplary tPA precursor sequence set forth in SEQ ID NO:253, a portion of a tPA precursor sequence can include amino acids 1-23, or amino acids 24-35, 24-32, or amino acids 33-35, or any other contiguous sequence of amino acids 1-35 set forth in SEQ ID NO:253.

[0250] As used herein, an active portion of a polypeptide, such as with reference to an active portion of an isoform, refers to a portion of polypeptide that has an activity.

[0251] As used herein, purification of a protein refers to the process of isolating a protein, such as from a homogenate, which can contain cell and tissue components, including DNA, cell membrane and other proteins. Proteins can be purified in any of a variety of ways known to those of skill in the art, such as for example, according to their isoelectric points by running them through a pH graded gel or an ion exchange column, according to their size or molecular weight via size exclusion chromatography or by SDS-PAGE (sodium dodecyl sulfate-polyacrylamide gel electrophoresis) analysis, or according to their hydrophobicity. Other purification techniques include, but are not limited to, precipitation or affinity chromatography, including immuno-affinity chromatography, and other techniques and methods that include a combination of any of these methods. Furthermore, purification can be facilitated by including a tag on the molecule, such as a his tag for affinity purification or a detectable marker for identification.

[0252] As used herein, detection includes methods that permit visualization (by eye or equipment) of a protein. A protein can be visualized using an antibody specific to the protein. Detection of a protein can also be facilitated by fusion of a protein with a tag including an epitope tag or label.

[0253] As used herein, a “tag” refers to a sequence of amino acids, typically added to the N- or C-terminus of a polypeptide. The inclusion of tags fused to a polypeptide can facilitate polypeptide purification and/or detection.

[0254] As used herein, an epitope tag includes a sequence of amino acids that has enough residues to provide an epitope against which an antibody can be made, yet short enough so that it does not interfere with an activity of the polypeptide to which it is fused. Suitable tag polypeptides generally have at least 6 amino acid residues and usually between about 8 and 50 amino acid residues.

[0255] As used herein, a label refers to a detectable compound or composition which is conjugated directly or indirectly to an isoform so as to generate a labeled isoform. The label can be detectable by itself (e.g., radioisotope labels or fluorescent labels) or, in the case of an enzymatic label, can catalyze chemical alteration of a substrate compound composition which is then detectable. Non-limiting examples of labels included fluorogenic moieties, green fluorescent protein, or luciferase.

[0256] As used herein, a fusion tagged polypeptide refers to a chimeric polypeptide containing an isoform polypeptide fused to a tag polypeptide.

[0257] As used herein, expression refers to the process by which a gene's coded information is converted into the structures present and operating in the cell. Expressed genes include those that are transcribed into mRNA and then translated into protein and those that are transcribed into RNA but not translated into protein (e.g., transfer and ribosomal RNA). For purposes herein, a protein that is expressed can be retained inside the cells, such as in the cytoplasm, or can be secreted from the cell. Total expression of a protein

[0258] As used herein, a fusion construct refers to a nucleic acid sequence containing a coding sequence from one nucleic acid molecule and the coding sequence from another nucleic acid molecule in which the coding sequences are in the same reading frame such that when the fusion construct is transcribed and translated in a host cell, the protein is produced containing the two proteins. The two molecules can be adjacent in the construct or separated by a linker polypeptide that contains, 1, 2, 3, or more, but typically fewer than 10, 9, 8, 7, 6 amino acids. The protein product encoded by a fusion construct is referred to as a fusion polypeptide.

[0259] As used herein, an isoform fusion protein or an isoform fusion polypeptide refers to a polypeptide encoded by a nucleic acid molecule that contains a coding sequence from an isoform, with or without an intron sequence, and a coding sequence that encodes another polypeptide, such as a precursor sequence or an epitope tag. The nucleic acids are operatively linked such that when the isoform fusion construct is transcribed and translated, an isoform fusion polypeptide is produced in which the isoform polypeptide is joined directly or via a linker to another peptide. An isoform polypeptide, typically is linked at the N—, or C-terminus, or both, to one or more other polypeptides.

[0260] As used herein, a promoter region refers to the portion of DNA of a gene that controls transcription of the DNA to which it is operatively linked. The promoter region includes specific sequences of DNA that are sufficient for RNA polymerase recognition, binding and transcription initiation. This portion of the promoter region is referred to as the promoter. In addition, the promoter region includes sequences that modulate this recognition, binding and transcription initiation activity of the RNA polymerase. These sequences can be cis acting or can be responsive to trans acting factors. Promoters, depending upon the nature of the regulation, can be constitutive or regulated.

[0261] As used herein, regulatory region means a cis-acting nucleotide sequence that influences expression, positively or negatively, of an operatively linked gene. Regulatory regions include sequences of nucleotides that confer inducible (i.e., require a substance or stimulus for increased transcription) expression of a gene. When an inducer is present or at increased concentration, gene expression can be increased. Regulatory regions also include sequences that confer repression of gene expression (i.e., a substance or stimulus decreases transcription). When a repressor is present or at increased concentration gene expression can be decreased. Regulatory regions are known to influence, modulate or control many in vivo biological activities including cell proliferation, cell growth and death, cell differentiation and immune modulation. Regulatory regions typically bind to one or more trans-acting proteins, which results in either increased or decreased transcription of the gene.

[0262] Particular examples of gene regulatory regions are promoters and enhancers. Promoters are sequences located around the transcription or translation start site, typically positioned 5′ of the translation start site. Promoters usually are located within 1 Kb of the translation start site, but can be located further away, for example, 2 Kb, 3 Kb, 4 Kb, 5 Kb or more, up to and including 10 Kb. Enhancers are known to influence gene expression when positioned 5′ or 3′ of the gene, or when positioned in or a part of an exon or an intron. Enhancers also can function at a significant distance from the gene, for example, at a distance from about 3 Kb, 5 Kb, 7 Kb, 10 Kb, 15 Kb or more.

[0263] Regulatory regions also include, in addition to promoter regions, sequences that facilitate translation, splicing signals for introns, maintenance of the correct reading frame of the gene to permit in-frame translation of mRNA and, stop codons, leader sequences and fusion partner sequences, internal ribosome binding site (IRES) elements for the creation of multigene, or polycistronic, messages, polyadenylation signals to provide proper polyadenylation of the transcript of a gene of interest and stop codons, and can be optionally included in an expression vector.

[0264] As used herein, the “amino acids,” which occur in the various amino acid sequences appearing herein, are identified according to their well-known, three-letter or one-letter abbreviations (see Table 1). The nucleotides, which occur in the various DNA fragments, are designated with the standard single-letter designations used routinely in the art.

[0265] As used herein, “amino acid residue” refers to an amino acid formed upon chemical digestion (hydrolysis) of a polypeptide at its peptide linkages. The amino acid residues described herein are generally in the “L” isomeric form. Residues in the “D” isomeric form can be substituted for any L-amino acid residue, as long as the desired functional property is retained by the polypeptide. NH2 refers to the free amino group present at the amino terminus of a polypeptide. COOH refers to the free carboxy group present at the carboxyl terminus of a polypeptide. In keeping with standard polypeptide nomenclature described in J. Biol. Chem., 243:3552-59 (1969) and adopted at 37 C.F.R. §§. 1.821-1.822, abbreviations for amino acid residues are shown in Table 1:

TABLE 1
Table of Correspondence

SYMBOL

| 1-Letter | 3-Letter | AMINO ACID |
|---|---|---|
| Y | Tyr | tyrosine |
| G | Gly | glycine |
| F | Phe | phenylalanine |
| M | Met | methionine |
| A | Ala | alanine |
| S | Ser | serine |
| I | Ile | isoleucine |
| L | Leu | leucine |
| T | Thr | threonine |
| V | Val | valine |
| P | Pro | proline |
| K | Lys | lysine |
| H | His | Histidine |
| Q | Gln | Glutamine |
| E | Glu | glutamic acid |
| Z | Glx | Glu and/or Gln |
| W | Trp | Tryptophan |
| R | Arg | Arginine |
| D | Asp | aspartic acid |
| N | Asn | Asparagines |
| B | Asx | Asn and/or Asp |
| C | Cys | Cysteine |
| X | Xaa | Unknown or other |

[0266] All sequences of amino acid residues represented herein by a formula have a left to right orientation in the conventional direction of amino-terminus to carboxyl-terminus. In addition, the phrase “amino acid residue” is defined to include the amino acids listed in the Table of Correspondence modified, non-natural and unusual amino acids. Furthermore, it should be noted that a dash at the beginning or end of an amino acid residue sequence indicates a peptide bond to a further sequence of one or more amino acid residues or to an amino-terminal group such as NH2 or to a carboxyl-terminal group such as COOH.

[0267] In a peptide or protein, suitable conservative substitutions of amino acids are known to those of skill in this art and generally can be made without altering a biological activity of a resulting molecule. Those of skill in this art recognize that, in general, single amino acid substitutions in non-essential regions of a polypeptide do not substantially alter biological activity (see, e.g., Watson et al. Molecular Biology of the Gene, 4th Edition, 1987, The Benjamin/Cummings Pub. co., p. 224).

[0268] Such substitutions may be made in accordance with those set forth in TABLE 2 as follows:

TABLE 2

| Original residue | Conservative substitution |
|---|---|
| Ala (A) | Gly; Ser |
| Arg (R) | Lys |
| Asn (N) | Gln; His |
| Cys (C) | Ser |
| Gln (Q) | Asn |
| Glu (E) | Asp |
| Gly (G) | Ala; Pro |
| His (H) | Asn; Gln |
| Ile (I) | Leu; Val |
| Leu (L) | Ile; Val |
| Lys (K) | Arg; Gln; Glu |
| Met (M) | Leu; Tyr; Ile |
| Phe (F) | Met; Leu; Tyr |
| Ser (S) | Thr |
| Thr (T) | Ser |
| Trp (W) | Tyr |
| Tyr (Y) | Trp; Phe |
| Val (V) | Ile; Leu |

Other substitutions also are permissible and can be determined empirically or in accord with other known conservative or non-conservative substitutions.

[0269] As used herein, a peptidomimetic is a compound that mimics the conformation and certain stereochemical features of a biologically active form of a particular peptide. In general, peptidomimetics are designed to mimic certain desirable properties of a compound, but not the undesirable properties, such as flexibility, that lead to a loss of a biologically active conformation and bond breakdown. Peptidomimetics can be prepared from biologically active compounds by replacing certain groups or bonds that contribute to the undesirable properties with bioisosteres. Bioisosteres are known to those of skill in the art. For example the methylene bioisostere CH2S has been used as an amide replacement in enkephalin analogs (see, e.g., Spatola (1983) pp. 267-357 in Chemistry and Biochemistry of Amino Acids, Peptides, and Proteins, Weinstein, Ed. volume 7, Marcel Dekker, New York). Morphine, which can be administered orally, is a compound that is a peptidomimetic of the peptide endorphin. For purposes herein, polypeptides in which one or more peptidic bonds that form the backbone of a polypeptide are replaced with bioisosteres are peptidomimetics.

[0270] As used herein, “similarity” between two proteins or nucleic acids refers to the relatedness between the sequence of amino acids of the proteins or the nucleotide sequences of the nucleic acids. Similarity can be based on the degree of identity and/or homology of sequences of residues and the residues contained therein. Methods for assessing the degree of similarity between proteins or nucleic acids are known to those of skill in the art. For example, in one method of assessing sequence similarity, two amino acid or nucleotide sequences are aligned in a manner that yields a maximal level of identity between the sequences. “Identity” refers to the extent to which the amino acid or nucleotide sequences are invariant. Alignment of amino acid sequences, and to some extent nucleotide sequences, also can take into account conservative differences and/or frequent substitutions in amino acids (or nucleotides). Conservative differences are those that preserve the physico-chemical properties of the residues involved. Alignments can be global (alignment of the compared sequences over the entire length of the sequences and including all residues) or local (the alignment of a portion of the sequences that includes only the most similar region or regions).

[0271] “Identity” per se has an art-recognized meaning and can be calculated using published techniques. (See, e.g.: Computational Molecular Biology, Lesk, A. M., ed., Oxford University Press, New York, 1988; Biocomputing: Informatics and Genome Projects, Smith, D. W., ed., Academic Press, New York, 1993; Computer Analysis of Sequence Data, Part I, Griffin, A. M., and Griffin, H. G., eds., Humana Press, New Jersey, 1994; Sequence Analysis in Molecular Biology, von Heinje, G., Academic Press, 1987; and Sequence Analysis Primer, Gribskov, M. and Devereux, J., eds., M Stockton Press, New York, 1991). While there exist a number of methods to measure identity between two polynucleotide or polypeptides, the term “identity” is well known to skilled artisans (Carrillo, H. & Lipman, D., SIAM J Applied Math 48:1073 (1988)).

[0272] As used herein, sequence identity compared along the full length of a polypeptide compared to another polypeptide refers to the percentage of identity of an amino acid in a polypeptide along its full-length. For example, if a polypeptide A has 100 amino acids and polypeptide B has 95 amino acids identical to amino acids 1-95 of polypeptide A, then polypeptide B has 95% identity when sequence identity is compared along the full length of a polypeptide A compared to full length of polypeptide B. As discussed below, and known to those of skill in the art, various programs and methods for assessing identity are known to those of skill in the art. High levels of identity, such as 90% or 95% identity, readily can be determined without software.

[0273] As used herein, by homologous (with respect to nucleic acid and/or amino acid sequences) means about greater than or equal to 25% sequence homology, typically greater than or equal to 25%, 40%, 60%, 70%, 80%, 85%, 90% or 95% sequence homology; the precise percentage can be specified if necessary. For purposes herein, the terms “homology” and “identity” are often used interchangeably, unless otherwise indicated. In general, for determination of the percentage homology or identity, sequences are aligned so that the highest order match is obtained (see, e.g.: Computational Molecular Biology, Lesk, A. M., ed., Oxford University Press, New York, 1988; Biocomputing: Informatics and Genome Projects, Smith, D. W., ed., Academic Press, New York, 1993; Computer Analysis of Sequence Data, Part I, Griffin, A. M., and Griffin, H. G., eds., Humana Press, New Jersey, 1994; Sequence Analysis in Molecular Biology, von Heinje, G., Academic Press, 1987; and Sequence Analysis Primer, Gribskov, M. and Devereux, J., eds., M Stockton Press, New York, 1991; Carrillo et al. (1988) SIAM J Applied Math 48:1073). By sequence homology, the number of conserved amino acids is determined by standard alignment algorithms programs, and can be used with default gap penalties established by each supplier. Substantially homologous nucleic acid molecules would hybridize typically at moderate stringency or at high stringency all along the length of the nucleic acid of interest. Also contemplated are nucleic acid molecules that contain degenerate codons in place of codons in the hybridizing nucleic acid molecule.

[0274] Whether any two nucleic acid molecules have nucleotide sequences that are at least 60%, 70%, 80%, 85%, 90%, 95%, 96%, 97%, 98% or 99% “identical” or “homologous” can be determined using known computer algorithms such as the “FASTA” program, using for example, the default parameters as in Pearson et al. (1988) Proc. Natl. Acad. Sci. USA 85:2444 (other programs include the GCG program package (Devereux, J., et al., Nucleic Acids Research 12(I):387 (1984)), BLASTP, BLASTN, FASTA (Altschul, S. F., et al., J Molec Biol 215:403 (1990); Guide to Huge Computers, Martin J. Bishop, ed., Academic Press, San Diego, 1994, and Carrillo et al. (1988) SIAM J Applied Math 48:1073). For example, the BLAST function of the National Center for Biotechnology Information database can be used to determine identity. Other commercially or publicly available programs include, DNAStar “MegAlign” program (Madison, Wis.) and the University of Wisconsin Genetics Computer Group (UWG) “Gap” program (Madison Wis.)). Percent homology or identity of proteins and/or nucleic acid molecules can be determined, for example, by comparing sequence information using a GAP computer program (e.g., Needleman et al. (1970) J. Mol. Biol. 48:443, as revised by Smith and Waterman ((1981) Adv. Appl. Math. 2:482). Briefly, the GAP program defines similarity as the number of aligned symbols (i.e., nucleotides or amino acids), which are similar, divided by the total number of symbols in the shorter of the two sequences. Default parameters for the GAP program can include: (1) a unary comparison matrix (containing a value of 1 for identities and 0 for non-identities) and the weighted comparison matrix of Gribskov et al. (1986) Nucl. Acids Res. 14:6745, as described by Schwartz and Dayhoff, eds., ATLAS OF PROTEIN SEQUENCE AND STRUCTURE, National Biomedical Research Foundation, pp. 353-358 (1979); (2) a penalty of 3.0 for each gap and an additional 0.10 penalty for each symbol in each gap; and (3) no penalty for end gaps.

[0275] Therefore, as used herein, the term “identity” or “homology” represents a comparison between a test and a reference polypeptide or polynucleotide. As used herein, the term at least “90% identical to” refers to percent identities from 90 to 99.99 relative to the reference nucleic acid or amino acid sequence of the polypeptide. Identity at a level of 90% or more is indicative of the fact that, assuming for exemplification purposes, a test and reference polypeptide length of 100 amino acids are compared. No more than 10% (i.e., 10 out of 100) of the amino acids in the test polypeptide differs from that of the reference polypeptide. Similar comparisons can be made between test and reference polynucleotides. Such differences can be represented as point mutations randomly distributed over the entire length of a polypeptide or they can be clustered in one or more locations of varying length up to the maximum allowable, e.g. 10/100 amino acid difference (approximately 90% identity). Differences are defined as nucleic acid or amino acid substitutions, insertions or deletions. At the level of homologies or identities above about 85-90%, the result should be independent of the program and gap parameters set; such high levels of identity can be assessed readily, often by manual alignment without relying on software.

[0276] As used herein, an aligned sequence refers to the use of homology (similarity and/or identity) to align corresponding positions in a sequence of nucleotides or amino acids. Typically, two or more sequences that are related by 50% or more identity are aligned. An aligned set of sequences refers to 2 or more sequences that are aligned at corresponding positions and can include aligning sequences derived from RNAs, such as ESTs and other cDNAs, aligned with genomic DNA sequence.

[0277] As used herein, “primer” refers to a nucleic acid molecule that can act as a point of initiation of template-directed DNA synthesis under appropriate conditions (e.g., in the presence of four different nucleoside triphosphates and a polymerization agent, such as DNA polymerase, RNA polymerase or reverse transcriptase) in an appropriate buffer and at a suitable temperature. It will be appreciated that certain nucleic acid molecules can serve as a “probe” and as a “primer.” A primer, however, has a 3′ hydroxyl group for extension. A primer can be used in a variety of methods, including, for example, polymerase chain reaction (PCR), reverse-transcriptase (RT)-PCR, RNA PCR, LCR, multiplex PCR, panhandle PCR, capture PCR, expression PCR, 3′ and 5′ RACE, in situ PCR, ligation-mediated PCR and other amplification protocols.

[0278] As used herein, “primer pair” refers to a set of primers that includes a 5′ (upstream) primer that hybridizes with the 5′ end of a sequence to be amplified (e.g. by PCR) and a 3′ (downstream) primer that hybridizes with the complement of the 3′ end of the sequence to be amplified.

[0279] As used herein, “specifically hybridizes” refers to annealing, by complementary base-pairing, of a nucleic acid molecule (e.g. an oligonucleotide) to a target nucleic acid molecule. Those of skill in the art are familiar with in vitro and in vivo parameters that affect specific hybridization, such as length and composition of the particular molecule. Parameters particularly relevant to in vitro hybridization further include annealing and washing temperature, buffer composition and salt concentration. Exemplary washing conditions for removing non-specifically bound nucleic acid molecules at high stringency are 0.1×SSPE, 0.1% SDS, 65° C., and at medium stringency are 0.2×SSPE, 0.1% SDS, 50° C. Equivalent stringency conditions are known in the art. The skilled person can readily adjust these parameters to achieve specific hybridization of a nucleic acid molecule to a target nucleic acid molecule appropriate for a particular application.

[0280] As used herein, an effective amount is the quantity of a therapeutic agent necessary for preventing, curing, ameliorating, arresting or partially arresting a symptom of a disease or disorder.

[0281] As used herein, unit dose form refers to physically discrete units suitable for human and animal subjects and packaged individually as is known in the art.

[0282] As used here, the singular forms “a,” “an” and “the” include plural referents unless the context clearly dictates otherwise. Thus, for example, reference to compound, comprising “an extracellular domain”” includes compounds with one or a plurality of extracellular domains.

[0283] As used herein, ranges and amounts can be expressed as “about” a particular value or range. About also includes the exact amount. Hence “about 5 bases” means “about 5 bases” and also “5 bases.’

[0284] As used herein,, “optional” or “optionally” means that the subsequently described event or circumstance does or does not not occur, and that the description includes instances where said event or circumstance occurs and instances where it does not. For example, an optionally substituted group means that the group is unsubstituted or is substituted.

[0285] As used herein, the abbreviations for any protective groups, amino acids and other compounds, are, unless indicated otherwise, in accord with their common usage, recognized abbreviations, or the IUPAC-IUB Commission on Biochemical Nomenclature (see, (1972) Biochem. 11:1726).

### B. Hepatocyte Growth Factor (HGF) and Met Receptor

[0286] Provided herein are isoforms of Hepatocyte Growth Factor (HGF). The HGF isoforms differ from the cognate ligand in that there are insertions and/or deletions so the resulting HGF isoforms exhibit a difference in one or more activities or functions or in structure compared to HGF. Activities or functions include, but are not limited to, receptor dimerization, cell signaling, cell migration, cell growth and proliferation, and angiogenesis. HGF isoforms have a plurality of activities, including activities as modulators of the HGF receptor, MET, and angioinhibitory activities. Among the HGF isoforms provided are those that modulate the activities of other growth factor receptors, such as VEGFR or FGFR by modulation of a VEGFR ligand or FGFR ligand, and also include HGF isoforms with general angioinhibitory activity. Among the HGF isoforms provided herein are those that exhibit MET receptor antagonist activity and also display anti-angiogenic activities.

[0287] 1. HGF

[0288] Hepatocyte growth factor (HGF, also called Scatter Factor, SF and Hepatopoeitin A) is a pleiotropic factor that targets a variety of epithelial and endothelial cells. HGF plays a role in organ regeneration, organogenesis, embryogenesis, and carcinogenesis. It has mitogenic, motogenic (enhancement of cell motility), and morphogenic activities. Particular physiologic functions of HGF include supporting organogenesis of various organs by mediating epithelial-mesenchymal interactions, and stimulating neovascularization in tumors by mediating tumor-stromal interaction. HGF contains a protease domain homologous to the catalytic domain of other serine proteases, such as for example, plasminogen, tPA, uPA, and factor XII. HGF, however, does not display protease activity due to alterations in two of the three amino acids that make up the catalytic triad (i.e. H534Q and S673Y).

[0289] An exemplary human HGF is encoded by a single open reading frame precursor of 728 amino acids containing a signal sequence at N-terminal amino acids 1-31. The mature HGF protein is proteolytically processed to a disulfide-linked heterodimer molecule composed of a 69 kDa alpha-chain (also called the heavy chain of the dimer) extending from amino acids 32 to 494 of the exemplary HGF set forth as SEQ ID NO:3 and a 34 kDa beta-chain (also called the light chain of the dimer) extending from amino acids 495 to 728 of the exemplary HGF set forth as SEQ ID NO:3. The alpha-chain of the HGF molecule contains four kringle structures that function as protein binding modules, and the beta-chain contains a serine protease (SerP)-like domain (see e.g., FIG. 2). For example, in the exemplary full-length HGF polypeptide provided herein as SEQ ID NO:3, and encoded by SEQ ID NO:2, the signal peptide is located at amino acids 1-31, an N-terminal domain is located at amino acids 34 to 124, a Kringle 1 domain is located at amino acids 128 to 206, a Kringle 2 domain is located at amino acids 211 to 288, a Kringle 3 domain is located at amino acids 305 to 383, a Kringle 4 domain is located at amino acids 391 to 469, an interchain between the alpha and beta chain is located between amino acids 487-604, and a serine protease (SerP, peptidase S1) domain is located at amino acids 495 to 728.

[0290] The HGF gene (SEQ ID NO:1) is composed of 18 exons interrupted by 17 introns (see e.g., FIG. 1). Exon 1 of HGF contains the 5′-untranslated region and signal peptide associated with secretion, exon 2 and exon 3 encode the N domain which is a hairpin loop region stabilized by two disulfide bonds, exon 4-11 encode the four kringles, each kringle being encoded by two exons, exon 12 contains the spacer between the alpha- and beta-chains, and the remaining six exons encode a SerP-like domain (see, e.g., Seki et al., (1991) Gene 102:213). In the exemplary genomic sequence of HGF provided herein as SEQ ID NO:1, exon 1 includes nucleotides 1-253, with the start codon beginning at nucleotide position 166; intron 1 includes nucleotides 254-7264; exon 2 includes nucleotides 7265-7431; intron 2 includes nucleotides 7432-11333; exon 3 includes nucleotides 11334-11445; intron 3 includes nucleotides 11446-12833; exon 4 includes nucleotides 12834-12948; intron 4 includes nucleotides 12949-17874; exon 5 includes nucleotides 17875-18117; intron 5 includes nucleotides 18118-25016; exon 6 includes nucleotides 25017-25137; intron 6 includes nucleotides 25138-26665; exon 7 includes nucleotides 26666-26784; intron 7 includes nucleotides 26785-40357; exon 8 includes nucleotides 40358-40532; intron 8 includes nucleotides 40533-44119; exon 9 includes nucleotides 44120-44247; intron 9 includes nucleotides 44248-49289; exon 10 includes nucleotides 49290-49392; intron 10 includes nucleotides 49393-52771; exon 11 includes nucleotides 52772-52905; intron 11 includes nucleotides 52906-58617; exon 12 includes nucleotides 58618-58656; intron 12 includes nucleotides 58657-59893; exon 13 includes nucleotides 59894-59991; intron 13 includes nucleotides 59992-62772; exon 14 includes nucleotides 62773-62847; intron 14 includes nucleotides 62848-63709; exon 15 includes nucleotides 63710-63850; intron 15 includes nucleotides 63851-64383; exon 16 includes nucleotides 64384-64490; intron 16 includes nucleotides 64491-64601; exon 17 includes nucleotides 64602-64747; intron 17 includes nucleotides 64748-67379; and exon 18 includes nucleotides 67380-68009.

[0291] HGF participates in a variety of its activities through modulation of the receptor designated MET. These activities include those associated with motility, mitogenesis, and morphogenesis of cells, including cancer cells, as well as the promotion of angiogenesis. For example, HGF acts as a mitogenic factor for hepatocytes (Nakamura et al. (1991), Prog. in Growth Factor Res. 3:67), epithelial cells (Dignass et al., (1994) Biochem. Biophys. Res. Comm. 202:701), endothelial cells (Bussolino et al., (1992) J. Cell Biol. 119:629), dermal fibroblasts (Kataoka et al., (1993) Cell Biol. Internat. 17:65), melanocytes (Matsumoto et al., (1991) Biochem. Biophys. Res. Comm. 176:45), and hematopoietic precursor cells (Kmiecik et al., (1992) Blood 80:2454). In addition, HGF acts as a motogenic factor for endothelial cells and many epithelial cells, including hepatocytes and for several tumor cells enhancing cellular invasiveness (Stoker et al., (1987) Nature 327:239; Weidner et al., (1991) Proc. Natl. Acad. Sci. 88:7001). HGF also acts as a morphogenic factor to induce tubule formation by kidney epithelial cells (Montesano et al., (1991) Cell 67:901), ductule formation by mammary epithelial cells (Tsafarty et al., (1992) Science 257:1258), and cord formation by hepatocytes (Michalopoulos et al., (1993) Am. J. Physiol. 156:443). Other properties of HGF include activity as a cytotoxic or cytostatic factor, such as for example in tumor cells (Shiota et al., (1992) Proc. Natl. Acad. Sci. 89:373), and as an angiogenic factor (Morishita et al., (2004) Curr Gene Ther. 4:199). Additionally, HGF displays immunoregulatory activities such as suppressing dendritic cell function (Okunishi et al., (2005) J Immunol. 175:4745).

[0292] Some HGF-mediated activities are induced upon binding and tyrosine-autophosphorylation of its receptor, MET, followed by the recruitment of a group of signaling molecules and/or adaptor proteins to the cytoplasmic domain of MET leading to the activation of multiple signaling cascades that form a complete network of intra and extracellular responses. Upon HGF binding, MET engages a number of SH2-containing signal transducers, including phosphotidylinositol 3-kinase, phospholipase C-γ, Stat3, Grb2, and the Grb2-associated docking protein Gab1, and indirectly activates the Ras-mitogen-activated protein kinase (MAPK) pathway. Different combinations of signaling pathways and signaling molecules and/or differences in magnitude of responses contribute to the diverse activities of HGF/MET. Further, the activity of HGF is influenced by cell type as well as different cellular environments.

[0293] The mechanism of MET activation by HGF requires cleavage of the single-chain HGF into a two-chain form. The single-chain form of HGF retains receptor binding, but lacks the biological activity of the two-chain form of HGF, and thus functions as an antagonist of HGF activity. It is likely that cleavage into a two-chain form results in a conformational change and a possible rearrangement of domains (Chirgadze et al., (1998) FEBS Letters 430: 126). Typically, activation of receptor tyrosine kinases, such as MET, requires a transition from a monomeric to dimeric state upon binding of their cognate ligand. Consequently, the ligand must either possess two binding sites or be a dimer itself. It is postulated that the conformational change of HGF into a two-chain form permits HGF to dimerize before receptor activation. Interactions between the SerP domains can stabilize the interaction of the dimer, since the SerP domain is critical for biological activity, but not receptor binding, of HGF. Heparin and heparin sulfates can further stabilize the full-length dimer, and are critical for crosslinking natural HGF isoform monomers, NK1 and NK2, for agonist activity (Chirgadze et al., (1998) FEBS Letters 430: 126).

[0294] a. HGF Domain Structure

[0295] Structure-function studies have elucidated functions of the HGF domains. Deletion of either the hairpin loop of the N-terminal domain, kringles 1 or 2, or the SerP domain abolishes the biological activity of HGF. In contrast, molecules with deletions of kringle 3 or kringle 4 display reduced but measurable activity (Chirgadze et al., (1998) FEBS Letters 430:126). The α-chain of HGF is responsible for binding to the MET receptor, and this interaction is primarily mediated by the N-terminal domain and the first kringle (K1) domain.

[0296] i. N Terminal Domain

[0297] The N-terminal domain, containing amino acids 34 to 124 of an exemplary HGF set forth in SEQ ID NO:3, is implicated in binding to heparin sulfate glycosaminoglycans (HSGAGs) on the surface of cells which is required for high affinity interactions with its receptor MET. Typically, binding of a ligand to HSGAGs or soluble heparin promotes the stabilization and/or localization of a ligand with a less abundant higher affinity tyrosine kinase receptor involved in signal transduction. Heparin binding promotes ligand oligomerization which can enhance signaling by stimulating dimerization of the tyrosine kinase receptor. Various growth factors, such as HGF, FGF1 and FGF2 rely on heparin-containing coreceptors to provide secondary binding sites that complement the interaction of the specific receptor and strengthen adhesive forces. For example, treatment of cells with heparitinase, which cleaves HSGAGs from the cell surface, diminishes HGF-MET crosslinking and administration of soluble heparin to cells alters HGF-mediated functions (Sakata et al., (1997) J Biol Chem., 272:9457). The heparin binding site of HGF is made up of basic and/or polar residues in the N-terminal domain of HGF (Zhou et al., (1998) Structure, 6:109) and studies have shown that the addition of heparin to a recombinant N-terminal domain, but not to a recombinant K1 domain, is sufficient to induce oligomerization of the domain (Sakata et al., (1997) J Biol Chem., 272:9457). Consequently, the N-terminal domain of HGF retains heparin or endogenous HSGAG binding ability required for ligand oligomerization, receptor binding, and receptor activation and signaling. The requirement for the N-terminal domain of HGF for binding of its receptor MET has implicated the N-terminal domain as a critical determinant of the antagonistic activity of the engineered HGF isoform NK4 (see below, (Kuba et al., (2000) Biochem. Biophys. Res. Commun. 279:846).

[0298] In addition to promoting receptor dimerization through interactions with heparin, interactions of the N-terminal domain with heparin sulfate also play a role in receptor-independent angiogenesis inhibition. A recombinant peptide of the HGF N-terminal domain inhibits angiogenesis not by disrupting the HGF/MET interaction, but rather by interfering with binding of HGF to endothelial GAGs, including HSGAG. Moreover, the anti-angiogenic role of the HGF N-terminal domain is not restricted to HGF since the N-terminal domain can antagonize multiple GAG-dependent growth factors such as HGF, FGF2, and VEGF by blocking their ability to interact with GAGs on the cell surface (Merkulova-Rainon et al., (2003) J Biol Chem. 278:37400).

[0299] ii. Kringle Domains

[0300] HGF contains four kringle domains designated K1, K2, K3, and K4. Based on the exemplary amino acid sequence of HGF set forth in SEQ ID NO:3, the K1 domain includes amino acids 128 to 206, the K2 domain includes amino acids 211 to 288, the K3 domain includes amino acids 305 to 383, and the K4 domain includes amino acids 391 to 469. Participation of kringle domains in protein-protein interactions suggests the receptor binding site of HGF is localized within one or more of its kringle domains. Reduction of HGF activity by mutagenesis of the K1 domain of HGF indirectly supports a role of K1 in binding MET. Other studies showing that the K1 domain can mimic HGF activity directly demonstrates a functional K1/MET interaction. For example, the K1 domain alone, but not the N-terminal domain, is sufficient to bind to and activate the MET receptor, such as by induction of receptor tyrosine kinase activation, MAP kinase activation, cell motility and cell proliferation. K1-mediated functions are heparin dependent and heparin independent: for example, K1 stimulation of mitogenic signaling is heparin dependent while K1 stimulation of cell motility is heparin independent (Rubin et al., (2001) J Biol Chem. 276: 32977). The K1 domain itself does not bind heparin suggesting that heparin sulfate may facilitate K1 signaling through a mechanism other than HGF-heparin sulfate binding such as direct interaction of heparin sulfate with the MET receptor. Indeed, other growth factor ligand/receptors require heparin binding for function. For example, FGF signaling through the FGFR requires not only FGF-heparin sulfate binding but also an interaction between FGFR and heparin sulfate. In support of this, the extracellular domain of MET contains a heparin binding site. Thus, the conflicting requirements of heparin sulfate for mediating K1-induced motogenic and mitogenic responses suggests that MET-heparin sulfate interactions recruit intracellular effectors that mediate distinct cellular responses. The reduced potency of recombinant K1 in stimulating DNA synthesis and cell motility compared to full length HGF or an isoform of HGF (NK1, see below), suggests that HGF containing an N-terminal domain that can bind heparin sulfate modulates self-association of the ligand thereby potentiating HGF signaling.

[0301] Generally, kringle domains also are associated with angiogenesis inhibition due to their protein binding ability, as evidenced by a number of proteins containing kringle domains. For example, angiostatin (a molecule containing the K1-K4 domains of plasminogen) inhibits the proliferation and migration of endothelial cells, and induces apoptosis. Similarly, the K2 domain of Prothrombin, the K1-K2 domains of tPA, and the K1 domain of uPA all demonstrate anti-angiogenic properties. The mechanism for inhibition of angiogenesis by kringle domains is postulated to involve interactions with putative angiogenic binding molecules on endothelial cells, such as for example, binding to ATP synthase, angiomotin, αvβ3 integrin, annexin II, or any one or more growth factor receptors such as MET (Matsumoto et al., (2005) Biochem Biophys Res Commun. 333:316; Kuba et al., (2000) Biochem. Biophys. Res. Commun. 279:846). As such, the K1-K4 domains, in the absence of the N-terminal domain or β-chain of HGF, are sufficient to mediate angioinhibitory activities of HGF (Kuba et al., (2000) Biochem. Biophys. Res. Commun. 279:846). The K1 domain also functions independently to inhibit growth factor-induced angiogenic functions, such as endothelial cell proliferation stimulated by FGF2 (Xin et al., (2000) Biochem. Biophys. Res. Commun. 277:186). The K3 and K4 domains in combination with the first two kringle domains display anti-angiogenic properties as discussed above, and also are important in facilitating interactions with the β-chain that are necessary for receptor activation (see below).

[0302] iii. β-Chain

[0303] The β-chain of HGF, containing amino acids 495 to 728 of the exemplary HGF set forth in SEQ ID NO:3, structurally resembles a serine protease and contains a serine protease (SerP) domain but lacks proteolytic activity due to two nonconservative substitutions within the catalytic triad. The β-chain of HGF is unable to bind to the MET receptor and alone exhibits none of the activities of HGF. Deletion, however, of the β-chain results in loss of biological activity of HGF even though the α-chain alone can bind to the HGF receptor (Date et al (1997) FEBS Letters 420:1-6). Concomitant stimulation of cells with a recombinant molecule containing essentially the α-chain containing all four kringle domains of HGF (NK4 isoform, see below) and the β-chain of HGF together induce HGF responses (Matsumoto et al., (1998) J Biol Chem. 36:22913). Administration of the β-chain with an HGF isoform containing only the N-terminal domain and two kringle domains does not support receptor binding or receptor activation by the β-chain. These results suggest a cooperative interaction between the α and β chains that is dependent on the presence of the K3 and K4 domains of HGF for interaction with the β chain. Thus, the β chain of HGF is required for optimum activation and subsequent activation of intracellular signal transduction pathways that lead to HGF-mediated mitogenic, morphogenic, and motogenic responses.

[0304] 2. HGF Variants

[0305] a. HGF Splice Variants

[0306] In addition to the full-length isoform of HGF, at least three additional splice variants of HGF have been identified in vivo. One, referred to as deleted HGF (delHGF, SEQ ID NO:24), contains a 5 amino acid deletion in the first kringle domain. delHGF shows similar activities to the full length HGF. The other two natural variants of HGF, termed NK1 (SEQ ID NO:30) and NK2 (SEQ ID NO:22), contain the N-terminal N domain followed by the first kringle domain (NK1) or the first two kringle domains (NK2). NK1 and NK2 display many of the functions of full-length HGF, however, experimental studies propose antagonist and agonist roles for these HGF isoforms. An engineered variant of HGF, termed NK4, contains the N-terminal N domain and all four kringle domains and functions as an antagonist of HGF since it can compete with full-length HGF for binding to MET, but it unable to stimulate detectable phosphorylation of the receptor. Other proposed isoforms of HGF include those set forth in SEQ ID NOS: 26 or 28.

[0307] The agonist or antagonist activities of NK1 and NK2 are contextual and depend on the cell type and/or experimental conditions. In particular, the agonistic functions of these HGF isoforms are correlated with heparin binding ability. This is because there is an important difference in the mechanism of receptor binding and activation of HGF and the truncated HGF forms NK1 and NK2. Mature HGF is postulated to induce MET receptor dimerization by forming a dimeric ligand and/or inducing a conformational change in the receptor tyrosine kinase, whereas NK1 and NK2 alone are unable to do this because they exist as monomers. The presence of heparin or GAGs can promote ligand dimerization and/or ligand-receptor oligomerization of some growth factor ligands. This allows a monomeric growth factor to induce receptor dimerization which is required for receptor activation. The crystal structure of NK1 predicts a model whereby repeating units of heparin sulfate bind two NK1 molecules through interaction with their respective N-terminal domains, thereby facilitating ligand dimerization and transactivation of the associated receptor kinases (Rubin et al., (2001) J Biol Chem., 276:32977). Thus, HGF is fully active in cells lacking heparin sulfate while NK1 and NK2 are only active in the presence of heparin or in cells that display heparin sulfate. Both NK1 and NK2 retain the N-terminal domain which mediates binding to heparin or the closely related heparin sulfate glycosaminoglycan (HSGAG) on the surface of cells. For example, in cells that lack heparin (i.e. heparin sulfate (HS)-deficient CHO cells) NK1 is unable to bind to MET. In contrast, heparin expressing cells or the addition of heparin to heparin-deficient cells exhibit ligand binding of the HGF isoforms and increased ligand-dependent activation of MET (Sakata et al., (1997) J Biol Chem. 272: 9457). Further, NK1 and NK2 retain proliferative activity in the presence, but not the absence of heparin (Schwall et al., (1996) J. Cell Biol. 133: 709-718). Thus, in the presence of heparin, or in the presence of heparin-expressing cells, NK1 and NK2 can function as agonists with properties very similar to HGF, but in the absence of heparin they can functions as antagonists. Importantly, depending on the cell type used and the presence of heparin, NK1 and NK2 can function either as an agonist or antagonist.

[0308] In vivo studies of the activities of NK1 and NK2 using transgenic mice demonstrate that the functions of NK1 and NK2 are distinct. NK1 transgenic mice exhibit a phenotype similar to HGF transgenic mice suggesting that NK1 indeed is a partial agonist and retains the ability to bind and activate the receptor in vivo (Jakubczak et al., (1998) Mol. Cell. Biol. 18: 1275). In contrast, mice transgenic for NK2 exhibit a dissociated agonist and antagonist phenotype. NK2 transgenic mice display agonist activity with respect to motogenic properties of MET-driven metastatic dissemination, but display antagonist mitogenic activity compared to the dysregulated cell growth observed in HGF and NK1 transgenic mice (Otsuka et al. (2000) Mol Cell Biol. 20: 2055).

[0309] NK4 (SEQ ID NO: 32), an engineered variant of HGF, is a true antagonist of HGF. NK4 antagonizes the mitogenic, motogenic, morphogenic, and tumor inhibitory activities of HGF. NK4 is prepared by enzymatic digestion of a highly purified recombinant HGF with elastase. Digestion of HGF with elastase yields two fragments; a fragment composed of the N-terminal 447 amino acids of the α-chain, including the N-terminal hairpin domain and four kringle domains (termed NK4), and a second fragment containing the β-chain and a portion of the α-chain containing the ⁴⁸⁷Cys which forms a disulfide bridge with the β-chain. NK4 binds to MET, although with reduced affinity compared to HGF, but it unable to activate the receptor due to the absence of the β-chain. Unlike other HGF isoforms, including for example NK1 or NK2, the presence of K4 in NK4 may induce a conformational change in the HGF thereby inhibiting receptor dimerization and activation, unless the β-chain is present (Matsumoto et al., (1998) J Biol Chem., 36:22913). Thus, NK4 competitively competes for HGF binding to the MET receptor and thereby antagonizes the biological functions of HGF. For example, NK4 inhibits HGF-induced cellular migration, invasion, and adhesion of cancer cells including breast, bladder, colorectal cancer cells, prostate, glioma, pancreatic, gastric, lung, and ovarian cancer cells (Jiang et al., (2005) Crit Rev Onc. Hema. 53:35). NK4 also inhibits other functions of HGF including HGF-induced vascular tubule formation from endothelial cells (Jiang et al., (1999) Clin Cancer Res 5:3695) and disruption of cell adhesion and tight junctions mediated by HGF signaling (Martin et al., (2004) Cell Biol Int 28: 361). Deletion of the N-terminal domain from NK4 abrogates the NK4-mediated HGF-antagonist activity demonstrating that the N-terminal domain is critical for binding of NK4 to MET (Kuba et al., (2000) Biochem. Biophys. Res. Commun. 279:846).

[0310] Besides acting as an antagonist of HGF, NK4 also displays general anti-angiogenic properties. The anti-angiogenic properties of NK4, including inhibition of proliferation and migration of endothelial cells, is independent of the MET receptor since NK4 antagonizes not only HGF- but FGF-2- and VEGF-mediated functions. The kringle domains of HGF are associated with angiogenesis inhibition (Kuba et al., (2000) Biochem. Biophys. Res. Commun. 279:846), and in fact, the K1 domain of HGF has been implicated in the angioinhibitory activity of NK4 since the first kringle domain alone is sufficient to inhibit cell proliferation stimulated by FGF-2 and enhance apoptosis in bovine aortic endothelial cells (Xin et al., (2000) Biochem. Biophys. Res. Commun. 277:186). The N-terminal domain also displays some anti-angiogenic function as it competes with growth factors, such as for example HGF, FGF-2, and VEGF, for binding to heparin (Merkulova-Rainon et al., (2003) J Biol Chem. 278:37400). Thus, the kringle domains, particularly K1, are responsible for the angioinhibitory activity of NK4, while the N-terminal domain of HGF augments the anti-angiogenic activities through competitive inhibition of binding of angiogenic growth factors to endothelial cells (Matsumoto et al., (2005) Biochem. Biophys. Res. Commun. 333:316). NK4 is postulated as a broad anti-cancer therapeutic candidate due to its bifunctionality as an HGF-antagonist and general angiogenesis inhibitor, mediating diverse anti-tumor activities such as inhibition of tumor metastasis, inhibition of invasion, inhibition of extracellular matrix degradation, and inhibition of tumor angiogenesis (Matsumoto et al., (2005) Biochem. Biophys. Res. Commun. 333:316).

[0311] b. HGF Allelic Variants

[0312] Variation occurs among members of a population or species (allelic variation) and also between species (species variation). An allelic variant of HGF can contain one or more nucleotide changes compared to SEQ ID NO: 1 or 2 or one or more amino acid changes compared to SEQ ID NO:3. Allelic variation can occur in any one or more of the exon or intron sequences of an HGF gene. Nucleic acids encoding HGF proteins and the encoded HGF polypeptides can include allelic variants of HGF. Exemplary allelic variants of HGF are set forth in Table 3. An exemplary HGF allelic variant can include any one or more nucleotide changes as set forth in SEQ ID NO: 15 or any one or more amino acid changes as set forth in SEQ ID NO:16.

[0313] In one example, allelic variants in HGF can include any one or more amino acid changes compared to a cognate HGF set forth in SEQ ID NO:3. For example, one or more amino acid variations can occur in the N-terminal domain of HGF. An allelic variant can include amino acid changes at position 78 where, for example, K can be replaced by N, or an amino acid change at position 82 where, for example, F can be replaced by L. An allelic variant of HGF also can occur in any one of the kringle domains of HGF. For example, an allelic variant can include amino acid changes in the K1 domain, such as an amino acid change at position 153 where, for example, S can be replaced by I, or at position 180 where, for example, P can be replaced by T. Additional amino acid changes can occur in the K3 domain. An allelic variant can include an amino acid change at position 293 where, for example, M can be replaced by V, or at position 300 where, for example, L can be replaced by M, or at position 304 where, for example, E can be replaced by K, or at position 317 where, for example, V can be replaced by A, or at position 325 where, for example, P can be replaced by S, or at position 330 where, for example D can be replaced by Y, or at position 336 where, for example, E can be replaced by K. Allelic variants also can occur in the K4 domain such as an amino acid change at position 387 where, for example, H can be replaced by N, or at position 416 where, for example, D can be replaced by N. Other allelic variations can occur in the serine protease domain of HGF. An allelic variant can include an amino acid change at position 494 where, for example, R can be replaced by Q, or at position 505 where, for example, I can be replaced by V, or at position 509 where, for example, V can be replaced by I, or at position 558 where, for example, D can be replaced by E, or at position 561 where, for example, C can be replaced by R, or at position 592 where, for example, D can be replaced by N, or at position 595 where, for example, S can be replaced by N.

[0314] In some cases, a nucleotide or amino acid difference can be “silent”, having no or virtually no detectable effect on a biological activity. In other examples, an allelic variant can result in a truncated or shortened polypeptide. For example, an allelic variation at nucleotide position 1256 where for example, G can be replaced by N, results in a change to a stop codon resulting in a translated protein that is shortened. In other examples, allelic variants, for example in the context of a wildtype or predominant form of the ligand, can be associated with a disease, condition, or change in biological activity.

TABLE 3

| | | Nucleotide | |
|---|---|---|---|
| Polymorphism | SNP # | change | Amino acid change |
| NT: 293 | 17855203 | 293 A/G | none |
| NT: 409 | | 409 T/C | AA 82 F/L |
| NT: 498 | 5745635 | 498 A/G | none |
| NT: 623 | 17566 | 623 G/T | AA 153 S/I |
| NT: 876 | 5745666 | 876 T/C | none |
| NT: 1075 | 5745687 | 1075 G/A | AA 304 E/K |
| NT: 1138 | | 1138 C/T | AA 325 P/S |
| NT: 1153 | 5745688 | 1153 G/T | AA 330 D/Y |
| NT: 1256 | 5745703 | 1256 G/A | Stop |
| AA: 494 | | | AA 494 R/Q |
| AA: 78 | | | AA 78 K/N |
| AA: 180 | | | AA 180 P/T |
| AA: 293 | | | AA 293 M/V |
| AA: 300 | | | AA 300 L/M |
| AA: 317 | | | AA 317 V/A |
| AA: 336 | | | AA 336 E/K |
| AA: 387 | | | AA 387 H/N |
| AA: 416 | | | AA 416 D/N |
| AA: 505 | | | AA 505 I/V |
| AA: 509 | | | AA 509 V/I |
| AA: 558 | | | AA 558 D/E |
| AA: 561 | | | AA 561 C/R |
| AA: 592 | | | AA 592 D/N |
| AA: 595 | | | AA 595 S/N |

[0315] Variants of HGF also include species variants. HGF is present in multiple species besides human such as, but not limited to, cow, dog, cat, mice, rats, and chicken. Exemplary sequences for species variants of HGF are set forth in any one of SEQ ID NOS:246-251.

[0316] 3. MET Receptor

[0317] MET receptor (also called c-MET, hepatocyte growth factor receptor, HGFR) is a receptor tyrosine kinase (RTK) that is produced as a precursor protein that is proteolytically cleaved into a heterodimeric molecule composed of an extracellular 50-kDa α chain disulfide-linked to a transmembrane 145-kDa β chain. In the fully processed MET protein, the α subunit contains a Sema domain involved in protein-protein interactions, and a cysteine-rich motif called a MET-related sequence. The β subunit, which traverses the membrane and is extracellular and intracellular, contains three functional domains including a juxtamembrane domain, the catalytic domain, and the C-terminal tail. HGF is the ligand for MET. Binding of HGF to MET triggers receptor dimerization and phosphorylation on multiple residues within the juxtamembrane, catalytic, and cytoplasmic tail domains, thereby regulating receptor internalization, catalytic activity, and multi-substrate docking. For example, the juxtamembrane domain contains a Ser985 residue that upon serine phosphorylation inhibits the kinase activity of MET; dephosphorylation of Ser985 allows HGF-dependent MET activation. The juxtamembrane domain also contains Tyr1003 that participates in the negative regulation of MET by targeting MET for ubiquitination and degradation by the proteasome pathway. The phosphorylation sites within the catalytic domain of MET include Tyr1230, Tyr1234, and Tyr1235 and the phosphorylation sites within the cytoplasmic tail include Tyr1349 and Tyr1356. Phosphorylation and activation of MET results in binding and/or phosphorylation of many intracellular signaling proteins including multiple adaptor proteins (e.g., Grb2, Shc, Cbl, Crk, cortectin, paxillin, and GAB 1), and a variety of other signal transducers (e.g., PI 3-kinase, FAK, Src, ERK 1/2, JNK 1/2, PLC-gamma, and STAT-3.

[0318] MET is highly expressed in epithelial cells and hepatocytes, but also is expressed on other cells of hematopoietic origin including germinal center B cells and terminally differentiated plasma cells. MET also is expressed in many cancer tissues and on solid tumors. Normally, HGF-MET signaling is involved in embryonic development, although MET signaling also mediates growth, invasion, motility, and metastasis of cancer cells as well as promotes angiogenesis in tumors. In addition to a role in cancer, MET also is a critical factor in the development of malaria infection as a mediator of signals that makes the host susceptible to infection, such as by rearranging the host-cell actin cytoskeleton and inhibiting apoptosis of infected cells (Carrolo et al., (2003) Nat Med., 9:1363; Leiriao et al., (2005) Cell Microbiol. 7:603).

[0319] An exemplary MET receptor (GenBank No. NP_{—}000236 set forth as SEQ ID NO:34) contains of an α chain between amino acids 1-307 and a β chain between amino acids 308-1390, with the intracellular domain of the β chain between residues 956-1390. MET is characterized by a Sema domain, between amino acids 55-500. In MET, the Sema domain is involved in receptor dimerization in addition to ligand binding. The MET protein also is characterized by a plexin cysteine rich repeat between amino acids 519-562 and three IPT/TIG domains between amino acids 563-655, amino acids 657-739 and amino acids 742-836. IPT stands for Immunoglobulin-like fold shared by Plexins and Transcription factors. TIG stands for the Immunoglobulin-like domain in transcription factors (Transcription factor IG). TIG domains in MET likely play a role in mediating some of the interactions between extracellular matrix and receptor signaling. The MET protein also is characterized by a transmembrane domain between amino acids 933-955, followed by a juxtamembrane domain beginning at amino acid 956, a cytoplasmic protein kinase domain between amino acids 1078-1337, and a cytoplasmic tail.

### C. HGF Isoforms

[0320] Provided herein are HGF isoforms and methods of using HGF isoforms for modulating mitogenesis, morphogenesis, and angiogenesis, including via MET receptor activities. In one embodiment, the HGF isoforms provided herein differ from the full-length HGF cognate ligand in that the nucleic acids encoding the isoforms retain part or all of any one or more of the seventeen introns. The resultant HGF isoform polypeptides contain insertions and/or deletions of amino acids such that the HGF protein includes a disruption or elimination of all of or a portion of one or more domains of a cognate HGF and thereby exhibit a difference in one or more activities or functions or structure compared to the cognate ligand. For example, the changes that HGF isoforms exhibit compared to an HGF can include, but are not limited to, elimination and/or disruption of all or part of a signal peptide, an N-terminal domain, one or more Kringle domains and/or a Ser-P domain. The HGF isoforms provided herein can be used for modulating the activity of a cell surface receptor, including a MET receptor, a VEGFR or a FGFR. They also can be used as targeting agents for delivery of molecules, such as drugs or toxins or nucleic acids, to targeted cells or tissues in vivo or in vitro.

[0321] Pharmaceutical compositions containing one or more HGF isoforms, typically one or more different isoforms, are provided. The pharmaceutical compositions can be used to treat diseases that include cancers, other diseases that manifest aberrant angiogenesis, malaria, and other diseases known to those of skill in the art in which a MET or angiogenic receptor such as a MET, VEGFR, or FGFR, are implicated, involved or in which they participate. Cancers include breast, lung, colon, gallbladder, gastric, pancreatic, mammary, ovarian, and prostate cancers, glioblastoma, lymphoma, malignant melanoma, and others.

[0322] Also provided are methods of treatment of diseases and conditions by administering the pharmaceutical compositions or delivering a HGF isoform, such by administering a vector that encodes the isoform. Administration can be effected in vivo or ex vivo.

[0323] Methods are provided herein for producing, isolating and formulating HGF isoforms, including producing HGF isoforms and nucleic acid molecules encoding HGF isoforms. Also provided are combinations of HGF isoforms with other modulators of MET signaling.

[0324] 1. Classes of HGF Isoforms

[0325] As noted, HGF isoforms are polypeptides that lack a domain or portion of a domain or have a disruption of a domain compared with a wildtype or predominant form of HGF sufficient to remove or reduce or otherwise alter, including having a positive or negative effect on, an activity compared to the cognate ligand. HGF isoforms represent splice variants of an HGF gene (or recombinant shortened variants) that can be generated by alternate splicing or by recombinant or synthetic methods. HGF isoforms can be encoded by alternatively spliced RNAs. HGF isoforms also can be generated by recombinant methods and by use of in silico and synthetic methods.

[0326] Typically, an HGF isoform produced from an alternatively spliced RNA is not a predominant form of a polypeptide encoded by a gene. In some instances, an HGF isoform can be a tissue-specific or developmental stage-specific polypeptide or can be disease specific (i.e., can be expressed at a different level from tissue-to-tissue or stage-to-stage or in a diseased state compared to a non-diseased state or only may be expressed in the tissue, at the stage, or during the disease process or progress). Alternatively spliced RNA forms that can encode HGF isoforms include, but are not limited to, exon deletion, exon retention, exon extension, exon truncation, and intron retention alternatively spliced RNAs. Included among HGF isoforms are intron fusion proteins.

[0327] 2. Alternative Splicing and Generation of HGF Isoforms

[0328] Genes in eukaryotes include intron and exons that are transcribed by RNA polymerase into RNA products generally referred to as pre-mRNA. Pre-mRNAs are typically intermediate products that are further processed through RNA splicing and processing to generate a final messenger RNA (mRNA). Typically, a final mRNA contains exon sequences and is obtained by splicing out the introns. Boundaries of introns and exons are marked by splice junctions, sequences of nucleotides that are used by the splicing machinery of the cell as signals and substrates for removing introns and joining together exon sequences. Exons are operatively linked together to form a mature RNA molecule. Typically, one or more exons in an mRNA contains an open reading frame encoding a polypeptide. In many cases, an open reading frame can be generated by operatively linking two or more exons; for example, a coding sequence can span exon junctions and an open reading frame is maintained across the junctions.

[0329] RNA also can undergo alternative splicing to produce a variety of different mRNA transcripts from a single gene. Alternatively spliced mRNAs can contain different numbers of and/or arrangements of exons. For example, a gene that has 10 exons can generate a variety of alternatively spliced mRNAs. Some mRNAs can contain all 10 exons, some with only 9, 8, 7, 6, 5 etc. In addition, products for example, with 9 of the 10 exons, can be among a variety of mRNAs, each with a different exon missing. Alternatively spliced mRNAs can contain additional exons, not typically present in an RNA encoding a predominant or wild type form. Addition and deletion of exons includes addition and deletion, respectively, of a 5′ exon, 3′exon and an exon internal in an RNA. Alternatively spliced RNA molecules also include addition of an intron or a portion of an intron operatively linked to or within an RNA. For example, an intron normally removed by splicing in an RNA encoding a wildtype or predominant form can be present in an alternatively spliced RNA. An intron or intron portion can be operatively linked within an RNA, such as between two exons. An intron or intron portion can be operatively linked at one end of an RNA, such as at the 3′ end of a transcript. In some examples, the presence of an intron sequence within an RNA terminates transcription based on poly-adenylation sequences within an intron.

[0330] Alternative RNA splicing patterns can vary depending upon the cell and tissue type. Alternative RNA splicing also can be regulated by developmental stage of an organism, cell or tissue type. For example, RNA splicing enzymes and polypeptides that regulate RNA splicing can be present at different concentrations in particular cell and tissue types and at particular stages of development. In some cases, a particular enzyme or regulatory polypeptide can be absent from a particular cell or tissue type or at particular stage of development. These differences can produce different splicing patterns for an RNA within a cell or tissue type or stage, thus giving rise to different populations of mRNAs. Such complexity can generate a number of protein products appropriate for particular cell types or developmental stages.

[0331] Alternatively spliced mRNAs can generate a variety of different polypeptides, also referred to herein as isoforms. Such isoforms can include polypeptides with deletions, additions and shortenings. For example, a portion of an open reading frame normally encoded by an exon can be removed in an alternatively spliced mRNA, thus resulting in a shorter polypeptide. An isoform can have amino acids removed at the N or C terminus or the deletion can be internal. An isoform can be missing a domain or a portion of a domain as a result of a deleted exon. Alternatively spliced mRNAs also can generate polypeptides with additional sequences. For example, a stop codon can be contained in an exon; when this exon is not included in an mRNA, the stop codon is not present and the open reading frame continues into the sequences contained in downstream exons. In such example, additional open reading frame sequences add additional amino acid residues to a polypeptide and can result in the addition of a new domain or a portion thereof.

[0332] a. Intron Modification and Intron Fusion Proteins

[0333] Among the HGF isoforms that can be generated by alternative RNA splicing patterns are isoforms generated through intron modification, also called intron fusion proteins. In one example, an HGF isoform is generated by alternative splicing such that one or more introns are retained compared to an mRNA transcript encoding a wildtype or predominant form of HGF. The incorporated intron sequences can include one or more introns or a portion thereof. Such mRNAs can arise by a mechanism of intron retention. For example, a pre-mRNA is exported from the nucleus to the cytoplasm of the cell before the splicing machinery has removed one or more introns. In some cases, splice sites can be actively blocked, for example by cellular proteins, preventing splicing of one or more introns.

[0334] The retention of one or more intron sequences can generate transcripts encoding HGF isoforms that are shortened compared to a wildtype or predominant form of HGF. A retained intron sequence can introduce a stop codon in the transcript and thus prematurely terminate the encoded polypeptide. A retained intron sequence also can introduce additional amino acids into an HGF polypeptide, such as the insertion of one or more codons into a transcript such that one or more amino acids are inserted into a domain of HGF. Intron retention includes the inclusion of a full or partial intron sequence into a transcript encoding an HGF isoform. The retained intron sequence can introduce nucleotide sequence with codons in-frame to the surrounding exons or it can introduce a frame shift into the transcript. Exemplary nucleotide sequences of intron retention transcripts include SEQ ID NOS:9, 11, or 13.

[0335] Generally, an intron fusion protein is an isoform that, due to the retention of any one or more intron sequences, lacks a domain or portion of a domain or contains an additional domain or portion of a domain sufficient to alter a biological activity compared to a cognate ligand. In addition, an intron fusion protein can contain one or more amino acids not encoded by an exon, operatively linked to exon-encoded amino acids resulting in an isoform that is lengthened or shortened compared to a wildtype or predominant form encoded by an HGF gene. Typically, an intron fusion protein is shortened by the presence of one or more stop codons in an intron fusion protein-encoding RNA that are not present in the corresponding sequence of an RNA encoding a wildtype or predominant form of an HGF polypeptide. Addition of amino acids and/or a stop codon can result in an intron fusion protein that differs in size and sequence from a wildtype or predominant form of a polypeptide.

[0336] An intron fusion protein can be modified in one or more biological activities. For example, addition of amino acids in an intron fusion protein can add, extend or modify a biological activity compared to a wildtype or predominant form of a polypeptide. For example, fusion of an intron encoded amino acid sequence to a protein can result in the addition of a domain with new functionality. Fusion of an intron encoded polypeptide to a protein also can modulate an existing biological activity of a protein, such as by inhibiting a biological activity, for example, inhibition of receptor dimerization and/or inhibition of receptor signaling.

[0337] Intron fusion proteins include natural and combinatorial intron fusion proteins. A natural intron fusion protein is encoded by an alternatively spliced RNA that contains one or more introns or a portion thereof operatively linked to one or more exons of a gene. Combinatorial intron fusion proteins are generated by recombinant or synthetic means and often mimic a natural intron fusion protein in that an intron-encoded sequence can be operatively linked to exon sequence(s) thereby encoding a polypeptide where one or more domains or a portion thereof is/are deleted or added as in a natural intron fusion protein derived from the same gene sequence or derived from a gene sequence in a related gene family.

[0338] i. Natural Intron Fusion Proteins

[0339] Natural intron fusion proteins are generated from a class of alternatively spliced mRNAs that include mRNAs containing intron sequence as well as exon sequences, such as intron retention RNA molecules and some exon extension RNAs. They include all such variants that occur and can be isolated from a cell or tissue or identified in a database. Any splice variant that is possible and that includes one or more codons (including only a stop codon) from an intron is considered a natural intron fusion protein.

[0340] Retention of one or more introns or a portion thereof can lead to the generation of isoforms referred to herein as natural intron fusion proteins. For example, an intron sequence can contain an open reading frame that is operatively linked to the exon sequences by RNA splicing. Intron-encoded sequences can add amino acids to a polypeptide, for example, at either the N- or C-terminus of a polypeptide, or internally within a polypeptide. In some examples, an intron sequence also can contain one or more stop codons. An intron encoded stop codon that is operatively linked with an open reading frame in one or more exons can terminate the encoded polypeptide. Thus, an isoform can be produced that is shortened as a result of the stop codon. In some examples, an intron retained in an mRNA can result in the addition of one or more amino acids and a stop codon to an open reading frame, thereby producing an isoform that terminates with an intron encoded sequence.

[0341] Provided herein are natural intron fusion proteins, that can be generated by intron retention, including intron fusion proteins with addition of domains or portion of domains encoded by an intron, and intron fusion proteins with one or more domains or portion of domain deleted. For example, an intron sequence can be operatively linked in place of an exon sequence that is typically within an mRNA for a gene. A domain or portion thereof encoded by the exon is thus deleted and intron encoded amino acids are included in the encoded polypeptide.

[0342] In another example, an intron sequence is operatively linked in addition to the typically present exons in an mRNA. In one example, an operatively linked intron sequence can introduce a stop codon in-frame with exon sequences encoding a polypeptide. In another example, an operatively linked intron sequence can introduce one or more amino acids into a polypeptide. In some embodiments, a stop codon in-frame also is operatively linked with exon sequences encoding a polypeptide, thereby generating an mRNA encoding a polypeptide with intron-encoded amino acids at the C-terminus.

[0343] In one example of a natural intron fusion protein, one or more amino acids encoded by an intron sequence are operatively linked at the C-terminus of a polypeptide. For example, an intron fusion protein is generated from a nucleic acid sequence that contains one or more exon sequences at the 5′ end of an RNA followed by one or more intron sequences or a portion of an intron sequence retained at the 3′ end of an RNA. An intron fusion protein produced from such nucleic acid contains exon-encoded amino acids at the N-terminus and one or more amino acids encoded by an intron sequence at the C-terminus. In another example, an intron fusion protein is generated from a nucleic acid by operatively linking a stop codon encoded within an intron sequence to one or more exon sequences, thereby generating a nucleic acid sequence encoding a shortened polypeptide.

[0344] ii. Combinatorial Intron Fusion Proteins

[0345] Intron fusion proteins also can be generated by recombinant methods and/or in silico and synthetic methods to produce polypeptides that are modified compared to a wildtype or predominant form of a polypeptide. Typically, such HGF isoforms have a modified sequence compared to a wildtype or predominant form due to the presence of an intron sequence operatively linked to an exon sequence of a gene. For example, as is described further herein, by using available software programs, intron and exons, sequences, and encoded protein domains can be identified in a nucleic acid, such as an HGF gene. Recombinant nucleic acid molecules encoding polypeptides can be synthesized that contain one or more exons and an intron sequence or portion thereof. Such recombinant molecules can contain 1, 2, 3, 4, 5, 6, 7, 8, 9, 10, or more amino acids and/or a stop codon encoded by an intron, operatively linked to an exon, producing an intron fusion protein.

[0346] An intron fusion protein generated by recombinant means can include a polypeptide that is longer or shorter compared to a wildtype or predominant form due to the presence of the encoded intron sequence. Typically, combinatorial intron fusion proteins are shortened polypeptides compared to a wildtype or predominant form. For example, recombinant molecules can contain one or more amino acids and/or a stop codon encoded by an intron, operatively linked to an exon, producing an isoform that is shorter than a wildtype or predominant form of HGF. Shortening can remove one or more domains or a portion thereof. These truncated forms can have deletions internally, at the N-terminus, at the C-terminus or a combination thereof. In another example, an intron sequence can result in a lengthened protein if the intron-encoded amino acid sequence results in the introduction of additional amino acids into an HGF polypeptide, such as the insertion of one or more codons into a transcript such that one or more amino acids are inserted into a domain of HGF, or result in the addition of a domain. Alternatively, an encoded intron sequence can result in a frame shift of an HGF transcript such that a stop codon is not read in a downstream exon resulting in a lengthened transcript. As part of this method, potential immunogenic epitopes can be recognized using motif scanning, and modified with conservative amino acid substitutions or by other modifications well known in the art, such as pegylation. Generally, any therapeutic intron fusion protein can be modified in this same way to achieve optimized pharmacokinetics or avoid immunogenicity.

[0347] b. Isoforms Generated by Exon Modifications

[0348] HGF isoforms also can be generated by modification of an exon relative to a corresponding exon of an RNA encoding a wildtype or predominant form of a HGF polypeptide. Exon modifications include alternatively spliced RNA forms such as exon truncations, exon extensions, exon deletions and exon insertions. These alternatively spliced RNA molecules can encode HGF isoforms which differ from a wildtype or predominant form of a HGF polypeptide by including additional amino acids and/or by lacking amino acid residues present in a wildtype or predominant form of a HGF polypeptide.

[0349] An inserted exon can operatively link additional amino acids encoded by the inserted exon to the other exons present in an RNA. An inserted exon also can contain one or more stop codons such that the RNA encoded polypeptide terminates as a result of such stop codons. If an exon containing such stop codons is inserted upstream of an exon that contains the stop codon used for polypeptide termination of a wildtype or predominant form of a polypeptide, a shortened polypeptide can be produced.

[0350] An inserted exon can maintain an open reading frame, such that when the exon is inserted, the RNA encodes an isoform containing an amino acid sequence of a wildtype or predominant form of a polypeptide with additional amino acids encoded by the inserted exon. An inserted exon can be inserted 5′, 3′ or internally in an RNA, such that additional amino acids encoded by the inserted exon are linked at the N terminus, C-terminus or internally, respectively in an isoform. An inserted exon also can change the reading frame of an RNA in which it is inserted, such that an isoform is produced that contains only a portion of the sequence of amino acids in a wildtype or predominant form of a polypeptide. Such isoforms can additionally contain amino acid sequences encoded by the inserted exon and also can terminate as a result of a stop codon contained in the inserted exon.

[0351] HGF isoforms also can be produced from exon deletion events. Deletion of an exon can produce a polypeptide of alternate size such as by removing sequences that encode amino acids as well as by changing the reading frame of an RNA encoding a polypeptide. An exon deletion can remove one or more amino acids from an encoded polypeptide; such amino acids can be N-terminal, C-terminal or internal to a polypeptide depending upon the location of the exon in an RNA sequence. Deletion of an exon in an RNA also can cause a shift in reading frame such that an isoform is produced containing one or more amino acids not present in a wildtype or predominant form of a polypeptide. A shift in reading frame also can result in a stop codon in the reading frame producing an isoform that terminates at a sequence different from that of a wildtype or predominant form of a polypeptide. In one example, a shift of reading frame produces an isoform that is shortened compared to a wildtype or predominant form of a polypeptide. Such shortened isoforms also can contain sequences of amino acids not present in a wildtype or predominant form of a polypeptide.

[0352] HGF isoforms also can be produced by exon extension in an RNA. Additional sequence contained in an exon extension can encode additional amino acids and/or can contain a stop codon that terminates a polypeptide. An exon insertion containing an in-frame stop codon can produce a shortened isoform, that terminates in the sequence of the exon extension. An exon insertion also can shift the reading frame of an RNA, resulting in an isoform containing one or more amino acids not present in a wildtype or predominant form of a polypeptide and/or an isoform that terminates at a sequence different from that of a wildtype or predominant form of a polypeptide. An exon extension can include sequences contained in an intron of an RNA encoding a wildtype or predominant form of a polypeptide and thereby produce an intron fusion protein.

[0353] HGF isoforms also can be produced by exon truncation. An RNA molecule with an exon truncation can produce a polypeptide that is shortened compared to a wildtype or predominant form of a polypeptide. An exon truncation also can result in a shift in reading frame such that an isoform is produced containing one or more amino acids not present in a wildtype or predominant form of a polypeptide. A shift in reading frame also can result in a stop codon in the reading frame producing an isoform that terminates at a sequence different from that of a wildtype or predominant form of a polypeptide.

[0354] Alternatively spliced RNA molecules including exon modifications can produce HGF isoforms that a lack a domain or a portion thereof sufficient to reduce or remove a biological activity. For example, exon modified RNA molecules can encode shortened HGF polypeptides that lack a domain or portion thereof. Exon modified RNA molecules also can encode polypeptides where a domain is interrupted by inserted amino acids and/or by a shift in reading frame that interrupts a domain with one or more amino acids not present in a wildtype or predominant form of a polypeptide.

[0355] 2. HGF Isoform Polypeptide Structure

[0356] The exemplary HGF gene (see e.g., SEQ ID NO:1, FIG. 1) includes 18 exons that contain a protein coding sequence interrupted by 17 introns. In a wildtype or predominant form of an HGF polypeptide, such as the polypeptide set forth in SEQ ID NO:3, which can be encoded by a nucleic acid molecule whose sequence is set forth in SEQ ID NO:2, 18 exons are joined by RNA splicing to form a transcript encoding a 728 amino acid polypeptide that includes a signal sequence, an N-terminal domain, four kringle domains (K1-K4), and a SerP domain (see. e.g, FIG. 2). HGF isoforms such as those provide herein, can be generated by alternative splicing such that the splicing pattern of the HGF is altered compared to the transcript encoding a wildtype or predominant form of HGF.

[0357] HGF isoforms generated by alternative splicing, such as by exon deletion, exon retention, exon extension, exon truncation, or intron retention, generally result in a ligand that lacks a domain or portion of a domain or that has a disruption in a domain such as by the insertion of one or more amino acids compared to HGF polypeptides of a wildtype or predominant form of the ligand. HGF isoforms also can contain a new domain and/or a function compared to a wildtype and/or predominant form of the ligand. The deletion, disruption and or insertion in the polypeptide sequence of an HGF isoform is sufficient to alter an activity compared to that of an HGF or change the structure compared to an HGF, such as by elimination of one or more domains or by addition of a domain or portion thereof, such as one encoded by an intron in the HGF gene. Provided herein are HGF isoforms generated by intron retention that lack all or some domains of an HGF polypeptide. HGF isoforms provided herein also can include intron-encoded amino acids that are inserted internally, or at the N- or C-terminus of an encoded isoform compared to a cognate ligand.

[0358] HGF isoforms can lack one or more domains or part of one or more domains compared to the polypeptide sequence of a wildtype or predominant form of the ligand. For example, an HGF isoform can lack the SerP domain or part of the SerP domain. Such isoforms can lack some or all of amino acids set forth as amino acids 495-728 of SEQ ID NO:3. Exemplary HGF isoforms lacking a SerP domain include SEQ ID NOS: 10, 12, 18, or 20 and exemplary HGF isoforms lacking some of a SerP domain include SEQ ID NO: 14. An HGF isoform can lack all or a part of a Kringle domain. Such isoforms include isoforms that lack any one or more or part of any one or more of the four Kringle domains including the K1, K2, K3, or K4 domain. An HGF isoform can lack part of the first Kringle domain, all of the first Kringle domain, part of the second Kringle domain, all of the second Kringle domain, part of the third Kringle domain, all of the third Kringle domain, part of the fourth Kringle domain, and/or all of the fourth Kringle domain, or combinations thereof. Such isoforms can lack some or all of amino acids set forth as amino acids 128-206 (K1), 211-288 (K2), 305-383 (K3), and/or 391-469 (K4) of SEQ ID NO:3. Exemplary HGF isoforms lacking part of a K1 domain include SEQ ID NO: 10 and 18. An HGF isoform also can lack all or part of an N-terminal domain.

[0359] An HGF isoform can include a disruption in a domain such as by the insertion of one or more amino acids compared to the polypeptide sequence of a wildtype or predominant form of HGF. For example, an HGF isoform can include an insertion of one or more amino acids in the signal peptide, in a N-terminal domain, in one or more of the Kringle domains, and/or in the SerP domain.

[0360] HGF isoforms also can include HGF polypeptide sequences that include the addition of a domain or a partial domain into the sequence. For example, an HGF isoform can include the addition of amino acids at the C-terminus of the protein, where such amino acid sequence is not found in the wildtype and/or predominant form of HGF. Exemplary HGF isoforms that include additional amino acid sequences at the C-terminal end of the polypeptide sequence include SEQ ID NOS: 10, 12, 18, or 20.

[0361] HGF isoform polypeptides also can contain amino acids that are not formally part of a domain but are found in between designated domains (referred to herein as linking regions). HGF isoforms also can include insertion, deletion and/or disruption in one or more linking regions. Exemplary HGF isoforms that include a disruption in a linking region include SEQ ID NOS: 10, 12, 18, or 20.

[0362] 3. HGF Isoform Activities

[0363] The HGF isoforms provided herein can possess different or altered activities compared with a wildtype or predominant form of HGF. An HGF isoform can be an agonist, partial agonist, or antagonist of MET signaling. An HGF isoform also can exhibit other activities that are independent of HGF-MET signaling. Generally, an HGF isoform provided herein inhibits an activity of its receptor MET, such as by acting as a ligand antagonist. HGF isoforms, provided herein, also can inhibit angiogenic activities by other growth factor ligands including VEGF and FGF-2. Altered activities include, for example, altered signal transduction and/or altered interactions with one or more cell surface molecules.

[0364] Generally, an activity is altered by an isoform at least 0.1, 0.5, 1, 2, 3, 4, 5, or 10 fold compared to a wildtype and/or predominant form of the ligand. Typically, an activity is altered 10, 20, 50, 100 or 1000 fold or more. For example, an isoform can be reduced in an activity compared to a wildtype and/or predominant form of the ligand. An isoform also can be increased in an activity compared to a wildtype and/or predominant form of a ligand. In assessing an activity of an HGF isoform, the isoform can be compared with a wildtype and/or predominant form of HGF. For example, an HGF isoform can be altered in an activity compared to the HGF polypeptide set forth as SEQ ID NO:3. An isoform also can be tested for an antagonist or inhibitory activity by assessing an activity of an HGF isoform in the presence of a wildtype and/or predominant form of HGF, or in the presence of a wildtype and/or predominant form of other growth factors such as VEGF or FGF-2.

[0365] a. Cell Surface Action Alterations

[0366] In one example, an HGF isoform is altered in cell surface interaction, including receptor interaction. For example, an isoform is reduced in binding affinity for one or more receptors, such as for example a MET receptor. In another example, an isoform is increased in affinity for one or more receptors. An HGF isoform also can be altered in its binding to other cell surface molecules. In one example, isoforms can be altered in binding to GAGs, such as heparin or heparin sulfate. In another example, isoforms can be altered in binding to other cell surface proteins involved in angiogenesis, such as for example, endothelial ATP synthase, angiomotin, αvβ3 integrin, annexin II, any one or more growth factor receptors such as MET, FGFR, or VEGFR, or any other cell surface molecule known to cooperate with a growth factor receptor to induce angiogenic responses. An isoform also can be altered in specificity for a receptor or other cell surface binding molecule. For example, an isoform can bind one receptor or other cell surface protein preferentially over other receptors or cell surface proteins, where such preferential binding is in comparison to the receptor specificity of a wildtype or predominant form of HGF. Isoforms altered in receptor or cell surface interaction can include isoforms that lack all or part of a N-terminal domain or have a disruption of a N-terminal domain. HGF isoforms with altered receptor or cell surface binding also can include isoforms that lack all or part of any one or more of a K1, K2, K3, or K4 domain. HGF isoforms altered in receptor interaction also can include isoforms that have a conformational change compared to a wildtype or predominant form of HGF, including monomeric isoforms.

[0367] HGF isoforms altered in interaction with a cell surface molecule, including its receptor MET, can be altered in one or more facets of signal transduction. An isoform, compared with a wildtype or predominant form of HGF can be altered in the modulation of one or more cellular responses, including inducing, augmenting, suppressing and preventing cellular responses from a receptor or other cell surface protein, such as a protein involved in angiogenesis responses. Examples of cellular responses that can be altered by an HGF isoform, include, but are not limited to, induction of mitogenic, motogenic, morphogenic, and/or angiogenic responses.

[0368] b. Competitive Antagonist

[0369] An HGF isoform can compete with another HGF form, such as a wildtype or predominant form of a cognate HGF, for receptor binding. Such isoforms can thus bind the MET receptor and reduce the amount of receptor available to bind to other HGF polypeptides. HGF isoforms that bind and compete for one or more receptors of HGF can include HGF isoforms that do not participate in signal transduction or are reduced in their ability to participate in signal transduction compared to a cognate HGF.

[0370] An HGF isoform antagonist that competes with a predominant ligand by binding to the MET cell surface receptor can include an N-terminal domain and all or part of any one or more Kringle domains of a cognate HGF ligand. An antagonistic HGF isoform can lack one or more domains, such that the isoform although bound to its receptor does not modulate signal transduction. For example, such isoforms can lack all or part of a β-chain including all or part of a SerP domain. In one example, an HGF isoform lacks one or more amino acids of the SerP domain, for example, lacking one or more amino acids corresponding to amino acids 495-728 of the HGF polypeptide set forth as SEQ ID NO:3. An HGF isoform antagonist also can lack all or part of any one of the four kringle domains. In one example, an HGF isoform lacks one or more amino acids corresponding to any one of the kringle domains of the cognate ligand set forth as SEQ ID NO:3, such as one or more amino acids between amino acids 128-206 (K1), 211-288 (K2), 305-383 (K3), and/or 391-469 (K4) of SEQ ID NO:3.

[0371] C. Negatively Acting and Inhibitory Isoforms

[0372] HGF isoforms also can modulate an activity of another polypeptide. The modulated polypeptide can be a wildtype or predominant form of HGF or can be a wildtype or predominant form of another growth factor, such as, but not limited to, FGF-2 or VEGF. An HGF isoform also can modulate another HGF, FGF-2, or VEGF isoform, such as isoforms expressed in a disease or condition. Such HGF isoforms can act as negatively acting ligands by preventing or inhibiting one or more biological activities of a wildtype or predominant form of a growth factor ligand/receptor pair. An HGF isoform can interact directly or indirectly to modulate an activity of a HGF, or other growth factor polypeptide. A negatively acting ligand need not bind or affect the ligand binding domain of a receptor, nor affect ligand binding to the receptor.

[0373] In one example, an HGF isoform can compete with another growth factor ligand for binding to a cell surface protein necessary for mediating receptor dimerization and/or angiogenic responses of the growth factor. For example, an HGF isoform can compete with another growth factor ligand for binding to heparin or a GAG, thereby preventing the formation of a dimeric ligand required for ligand-mediated signaling of a cognate receptor. Such an HGF isoform includes all or part of an N-terminal domain of HGF sufficient to bind to a GAG. An HGF isoform further can lack all or part of any one or more of a K1, K2, K3, or K4 domain, or a SerP domain of a cognate HGF as long as the HGF isoform binds to a GAG but does not itself induce receptor dimerization and activation.

[0374] In another example, an HGF isoform can bind to a cell surface molecule that modulates or cooperates with the signaling induced by another ligand-receptor pair. For example, an HGF isoform can bind to a protein involved in the angiogenic response, such as for example endothelial ATP synthase, angiomotin, αvβ3 integrin, annexin II, a growth factor receptors such as MET, FGFR, or VEGFR, or any other cell surface molecule that modulates and/or cooperates with angiogenic signals induced by binding of HGF, VEGF, FGF-2, or other growth factor to its receptor. Such an HGF isoform includes all or part of a K1 domain. An HGF isoform further can lack all or part of any one or more of a N-terminal domain, K2, K3, K4, or SerP domain as long as the HGF isoform binds to an angiogenic molecule to modulate an angiogenic response induced by a growth factor, but does not itself induce MET receptor activation.

### D. Methods for Identifying and Generating HGF Isoforms

[0375] HGF isoforms can be identified and produced by any of a variety of methods. For example they can be identified by analysis and identification of genes and expression products (RNA molecules) using cloning methods in combination with bioinformatics methods such as sequence alignments and domain mapping and selections.

[0376] 1. Methods for Identifying and Isolating Isoforms

[0377] Exemplary methods for identifying and isolating HGF isoforms include cloning of expressed gene sequences and alignment with a gene sequence such as a genomic DNA sequence. Expressed sequences, such as cDNA molecules or regions of cDNA molecules, are isolated. Primers can be designed to amplify a cDNA or a region of a cDNA. In one example, primers are designed which overlap or flank the start codon of the open reading frame of an HGF gene and primers are designed which overlap or flank the stop codon of the open reading frame. Primers can be used in PCR, such as in reverse transcriptase PCR (RT-PCR) with mRNA, to amplify nucleic acid molecules encoding open reading frames. Such nucleic acid molecules can be sequenced to identify those that encode an isoform. In one example, nucleic acid molecules of different sizes (e.g. molecular masses) from a predicted size (such as a size predicted for an encoded wildtype or predominant form) are chosen as candidate isoforms. Such nucleic acid molecules then can be analyzed, such as by a method described herein, to further select isoform-encoding molecules having specified properties.

[0378] Computational analysis is performed using the obtained nucleic acid sequences to further select candidate isoforms. For example, cDNA sequences are aligned with a genomic sequence of a selected candidate gene. Such alignments can be performed manually or by using bioinformatics programs such as SIM4, a computer program for analysis of splice variants. Sequences with canonical donor-acceptor splicing sites (e.g. GT-AG) are selected. Molecules can be chosen which represent alternatively spliced products such as exon deletion, exon retention, exon extension and intron retention.

[0379] Sequence analysis of isolated nucleic acid molecules also can be used to further select isoforms that retain or lack a domain and/or a function compared to a wildtype or predominant form. For example, isoforms encoded by isolated nucleic acid molecules can be analyzed using bioinformatics programs such as described herein to identify protein domains. Isoforms then can be selected which retain or lack a domain or a portion thereof.

[0380] In one embodiment, isoforms are selected that lack a SerP domain or portion thereof sufficient to reduce an activity. For example, isoforms are selected that lack one or more amino acids of the SerP domain or have a disruption of the SerP domain, such as an insertion of one or more amino acids. Isoforms also can be selected that lack a SerP domain or portion thereof and have one or more amino acids operatively linked in place of the missing domain or portion of a domain. Such isoforms can be the result of alternative splicing events such as exon extension, intron retention, exon deletion and exon insertion. In some case, such alternatively spliced RNA molecules alter the reading frame of an RNA and/or operatively link sequences not found in an RNA encoding a wildtype or predominant form.

[0381] In another embodiment, isoforms are selected that lack at least one kringle domain or part of a kringle domain. For example, an isoform is selected that lacks any one or more and/or part of any one or more of the K1, K2, K3, or K4 domains. Such isoforms can include those that lack one or more amino acids of the K1 domain. For example, HGF isoforms can lack one or more of amino acids corresponding to amino acids 128-206 of SEQ ID NO:3. Such isoforms also can lack a SerP domain. The isoforms can be the result of alternative splicing events such as exon extension, intron retention, exon deletion and exon insertion. In some case, such alternatively spliced RNA molecules alter the reading frame of an RNA and/or operatively link sequences not found in an RNA encoding a wildtype or predominant form. Such isoforms can include additional amino acid sequences not found in a wildtype or predominant form of HGF. In one example, an additional amino acid sequence is contained at the C-terminus of an HGF isoform.

[0382] Nucleic acid molecules can be selected which encode an HGF isoform and have an activity that differs from a wildtype or predominant form of HGF. In one example, HGF isoforms are selected that lack a SerP domain such that the isoforms do not stimulate signal transduction by MET. In another example, HGF isoforms are selected that lack all or part of at least one kringle domain, but maintain binding to MET and/or another cell surface interacting partner, such as for example heparin, and that alter one or more biological activities of a growth factor receptor stimulated by a its growth factor ligand, including ligand interactions and signal transduction.

[0383] 2. Identification of Allelic and Species Variants of Isoforms

[0384] Allelic variants and species variants of ligand isoforms, such as HGF isoforms, can be generated or identified. Such variants differ in one or more amino acids from a particular HGF isoform or cognate HGF. Allelic variation occurs among members of a population and species variation occurs between species. For example, isoforms can be derived from different alleles of a gene; each allele can have one or more amino acid differences from the other. Such alleles can have conservative and/or non-conservative amino acid differences. Allelic variants also include isoforms produced or identified from different subjects, such as individual subjects or animal models or other animals. Amino acid changes can result in modulation of an isoform's biological activity. In some cases, an amino acid difference can be “silent”, having no or virtually no detectable affect on a biological activity. Allelic variants of isoforms also can be generated by mutagenesis. Such mutagenesis can be random or directed. For example, allelic variant isoforms can be generated that alter amino acid sequences or a potential glycosylation site to effect a change in glycosylation of an isoform, including alternate glycosylation, increased or inhibition of glycosylation at a site in an isoform. Allelic variant isoforms can be are at least 90% identical in sequence to an isoform. Generally, an allelic variant isoform from the same species is at least 95%, 96%, 97%, 98%, 99% identical to an isoform, typically an allelic variant is 98%, 99%, 99.5% identical to an isoform.

[0385] For example, HGF isoforms, including HGF isoforms herein, can include allelic variation in the HGF polypeptide. For example, an HGF isoform can include one or more amino acid differences present in an allelic variant of a cognate HGF. In one example, an HGF isoform includes one or more allelic variations as set forth in SEQ ID NO:16. Examples of allelic variation include variants in the N-terminal domain, kringle domains, or SerP domain, including, but not limited to, amino acid variation at positions corresponding to amino acids 78, 82, 153, 180, 293, 300, 304, 317, 325, 330, 336, 387, 416, 494, 505, or 509 set forth in SEQ ID NO:16. HGF isoforms also include species variants of a cognate HGF.

### E. Exemplary HGF Isoforms

[0386] 1. HGF Isoforms

[0387] Isoforms of HGF are provided. In particular, isoforms of HGF that are truncated but that include at least all or part of the K4 region but lack one or more of all of part of the N-terminal domain, K1, K2, K3, or SerP domain are provided.

[0388] 2. HGF Intron Fusion Proteins

[0389] Provided herein are exemplary HGF isoforms that have an altered domain organization compared to a cognate HGF due to the retention of an intron-encoded sequence in the nucleic acid molecule that encodes the HGF isoform.

[0390] HGF isoforms provided herein are encoded by nucleic acid molecules that include all or a portion of any intron of an HGF, except for intron 5, operatively linked to an exon. The intron portion can include one codon, including a stop codon, which results in an HGF isoform that ends at the end of the exon, or can include more codons so that the HGF isoform includes intron encoded residues.

[0391] The intron/exon structure of an exemplary HGF isoform is depicted in FIG. 1. A sequence therefor is set forth in SEQ ID NO:1. In the exemplary genomic sequence of HGF set forth in SEQ ID NO:1, HGF isoforms provided herein can include all or a portion of any intron of an HGF, such as all of part of intron 1 containing nucleotides 254-7264, intron 2 containing nucleotides 7432-11333, intron 3 containing nucleotides 11446-12833, intron 4 containing nucleotides 12949-17874, intron 6 containing nucleotides 25138-26665, intron 7 containing nucleotides 26785-40357, intron 8 containing nucleotides 40533-44119, intron 9 containing nucleotides 44248-49289, intron 10 containing nucleotides 49393-52771, intron 11 containing nucleotides 52906-58617, intron 12 containing nucleotides 58657-59893, intron 13 containing nucleotides 59992-62772, intron 14 containing nucleotides 62848-63709, intron 15 containing nucleotides 63851-64383, intron 16 containing nucleotides 64491-64601, and intron 17 containing nucleotides 64748-67379. Exemplary HGF isoforms retain all or part of intron 11 or intron 13 of an HGF gene. An intron-encoded portion of an isoform can exist N-terminally, C-terminally, or internally to an exon sequence(s) operatively linked to the intron.

[0392] In one embodiment, intron fusion proteins of HGF, or allelic variants thereof, provided herein lack all or part of a domain of the full length cognate HGF such that the HGF isoform exhibits an antagonistic and/or anti-angiogenic activity. Isoforms provided herein lack one or more of part of an N-terminal domain, part of a K1 domain, part of a K2 domain, part of a K3 domain, part of a K4 domain, and all or part of a SerP domain of a cognate HGF, or combinations thereof. The truncations and deletions when selected produce an isoform with the aforementioned activity.

[0393] An isoform includes intron-encoded amino acids from any one or more of introns 1, 2, 3, 4, 6, 7, 8, 9, 10, 11, 12, 13, 14, 15, 16, or 17 internally within the isoform, or at the N- or C-terminus or the isoform is truncated at the end of an exon. HGF isoforms and allelic variants thereof provided herein can exhibit anti-angiogenic activity. For example, an isoform can lack all or part of an N-terminal domain, part of a K1 domain, all or part of a K2 domain, all or part of a K3 domain, all or part of a K4 domain, or all or part of a SerP domain, or combinations thereof. An isoform can include intron-encoded amino acids from any one or more of introns 1, 2, 3, 4, 6, 7, 8, 9, 10, 11, 12, 13, 14, 15, 16, or 17 internally within the isoform, or at the N- or C-terminus. In some examples, an isoform that is anti-angiogenic also can exhibit antagonistic activity.

[0394] Among the HGF isoforms provided herein is an isoform whose encoding nucleic acid molecule is designated SR023A02. Nucleic acid and amino acid sequences therefor are set forth in SEQ ID NOS:9 or 17. Clone SR023A02 contains 1471 bases, including an intron portion at the C-terminus-encoding end. The intron portions contains the first 34 nucleotides of intron 11. The intron 11 portion encodes three amino acids followed by a stop codon. In the clone this portion is operatively linked to an open reading frame of exons 1-11. The encoded HGF isoform is truncated compared to the cognate HGF and includes the three intron encoded amino acids at the C-terminus. SR023A02 encodes a 467 amino acid HGF isoform polypeptide whose sequence is set forth in SEQ ID NO:10 or 18, which each encode the SR023A02 isoform but differ in two amino acids. SEQ ID NO:10 contains a Leu at position 82 and a Ser at position 320. SEQ ID NO:18 has a Phe and Pro at these positions, respectively, which correspond to the amino acids of the cognate HGF set forth in SEQ ID NO:3. The SR023A02 isoform contains a signal sequence at the N-terminus at amino acids 1-31 and an N-terminal domain following the signal sequence at amino acids 34-124. Compared with a cognate receptor set forth in SEQ ID NO:3, the SR023A02 encoded HGF isoform contains a deletion of amino acids 161-165 in the K1 domain (see. e.g., FIG. 2). Further, this isoform includes a K2, K3, and K4 domain corresponding to amino acids 211-288, 305-383, and 391-469, respectively, of SEQ ID NO:3 and it lacks the SerP domain. The isoform encoded by SR023A02 also includes an additional 3 amino acids following the K4 domain (amino acids 465-467) not present in the cognate HGF set forth as SEQ ID NO:3. Also provided are allelic and species variants of SR023A02. These are produced by isolating them from another source or synthesizing them based on the known sequences of the cognate receptor. These differ at the residue in which the encoding nucleic acid differs from the SEQ ID NO:2. Exemplary HGF allelic variants are set forth in SEQ ID NO:15 or 16.

[0395] Provided herein is another exemplary HGF isoform that is encoded by a nucleic acid molecule designated SR023A08, whose sequence is set forth in SEQ ID NOS:11 or 19. SR023A08 contains 1495 bases, including an intron portion at the C-terminus containing the first 34 nucleotides of intron 11. The intron 11 portion encodes three amino acids followed by a stop codon that is operatively linked with an open reading frame of exons 1-11 of the encoded polypeptide thereby resulting in an HGF isoform that is truncated compared to a cognate HGF. The HGF isoform encoded by SR023A08 contains 472 amino acids set forth in SEQ ID NO:12 or 20, which each encode the SR023A08 isoform but differ in one amino acid. SEQ ID NO:12 contains a Lys at position 304 while SEQ ID NO:20 has Glu at this position which corresponds to the amino acid of the cognate HGF set forth in SEQ ID NO:3. This isoform includes a signal sequence at the N-terminus at amino acids 1-31, an N-terminal domain at amino acids 34-124, a K1 domain at amino acids 128-206, a K2 domain at amino acids 211-288, a K3 domain at amino acids 305-383, and a K4 domain at amino acids 391-469 (see e.g., FIG. 2). The HGF isoform encoded by SR023A08 lacks a SerP domain, but contains an additional 3 amino acids following the K4 domain (amino acids 470-472) not present in the cognate HGF set forth as SEQ ID NO:3. SR023A08 variants, including allelic and species variants are provided. These differ at the residue in which the encoding nucleic acid differs from the SEQ ID NO:2. Exemplary HGF allelic variants are set forth in SEQ ID NO:16 and encoded in SEQ ID NO: 15.

[0396] Another exemplary HGF isoform encoded by the clone SR023E09 is provided. The encoding nucleic acid sequence set forth in SEQ ID NO:13. This clone contains 1613 bases, including an intron portion at the C-terminus containing the first 66 nucleotides of intron 13. The intron 13 portion encodes a stop codon that is operatively linked with an open reading frame of exons 1-13 of the encoded polypeptide thereby resulting in an HGF isoform that is truncated compared to a cognate HGF. The SR023E09 encoded isoform is 514 amino acids in length, including the signal sequence. The amino acid sequence of the isoform is set forth in SEQ ID NO:14. The isoform contains an N-terminal signal sequence at amino acids 1-31, an N-terminal domain at amino acids 34-124, a K1 domain at amino acids 128-206, a K2 domain at amino acids 211-288, a K3 domain at amino acids 305-383, and a K4 domain at amino acids 391-469 (see e.g., FIG. 2). This isoform is truncated after amino acid 514 and thereby lacks part of the SerP domain corresponding to amino acids 515-728 of a cognate HGF set forth in SEQ ID NO:3. Variants, including allelic and species variants of the SR023A08 encoded HGF isoform are provided. These include allelic variations, such as any one of the allelic variations set forth in SEQ ID NO:15 or 16 of a cognate HGF nucleic acid or polypeptide, respectively.

### F. Methods for Producing Nucleic Acids Encoding HGF Isoform Polypeptides

[0397] Exemplary methods for generating HGF isoform nucleic acid molecules and polypeptides include molecular biology techniques known to one of skill in the art. Such methods include in vitro synthesis methods for nucleic acid molecules such as PCR, synthetic gene construction and in vitro ligation of isolated and/or synthesized nucleic acid fragments. HGF isoform nucleic acid molecules also can be isolated by cloning methods, including PCR of RNA and DNA isolated from cells and screening of nucleic acid molecule libraries by hybridization and/or expression screening methods.

[0398] HGF isoform polypeptides can be generated from HGF isoform nucleic acid molecules using in vitro and in vivo synthesis methods. HGF isoforms can be expressed in any organism suitable to produce the required amounts and forms of the isoform needed for administration and treatment. Expression hosts include prokaryotic and eukaryotic organisms such as E. coli, yeast, plants, insect cells, mammalian cells, including human cell lines and transgenic animals. HGF isoforms also can be isolated from cells and organisms in which they are expressed, including cells and organisms in which isoforms are produced recombinantly and those in which isoforms are synthesized without recombinant means such as genomically-encoded isoforms produced by alternative splicing events.

[0399] 1. Synthetic Genes and Polypeptides

[0400] HGF isoform nucleic acid molecules and polypeptides can be synthesized by methods known to one of skill in the art using synthetic gene synthesis. In such methods, a polypeptide sequence of an HGF isoform is “back-translated” to generate one or more nucleic acid molecules encoding an isoform. The back-translated nucleic acid molecule is then synthesized as one or more DNA fragments such as by using automated DNA synthesis technology. The fragments are then operatively linked to form a nucleic acid molecule encoding an isoform. Nucleic acid molecules also can be joined with additional nucleic acid molecules such as vectors, regulatory sequences for regulating transcription and translation and other polypeptide-encoding nucleic acid molecules. Isoform-encoding nucleic acid molecules also can be joined with labels such as for tracking, including radiolabels, and fluorescent moieties.

[0401] The process of back-translation uses the genetic code to obtain a nucleotide gene sequence for any polypeptide of interest, such as an HGF isoform. The genetic code is degenerate, 64 codons specify 20 amino acids and 3 stop codons. Such degeneracy permits flexibility in nucleic acid design and generation, allowing, for example, restriction sites to be added to facilitate the linking of nucleic acid fragments and the placement of unique identifier sequences within each synthesized fragment. Degeneracy of the genetic code also allows the design of nucleic acid molecules to avoid unwanted nucleotide sequences, including unwanted restriction sites, splicing donor or acceptor sites, or other nucleotide sequences potentially detrimental to efficient translation. Additionally, organisms sometimes favor particular codon usage and/or a defined ratio of GC to AT nucleotides. Thus, degeneracy of the genetic code permits design of nucleic acid molecules tailored for expression in particular organisms or groups of organisms. Additionally, nucleic acid molecules can be designed for different levels of expression based on optimizing (or non-optimizing) of the sequences. Back-translation is performed by selecting codons that encode a polypeptide. Such processes can be performed manually using a table of the genetic code and a polypeptide sequence. Alternatively, computer programs, including publicly available software can be used to generate back-translated nucleic acid sequences.

[0402] To synthesize a back-translated nucleic acid molecule, any method available in the art for nucleic acid synthesis can be used. For example, individual oligonucleotides corresponding to fragments of an HGF isoform-encoding sequence of nucleotides are synthesized by standard automated methods and mixed together in an annealing or hybridization reaction. Such oligonucleotides are synthesized such that annealing results in the self-assembly of the gene from the oligonucleotides using overlapping single-stranded overhangs formed upon duplexing complementary sequences, generally about 100 nucleotides in length. Single nucleotide “nicks” in the duplex DNA are sealed using ligation, for example with bacteriophage T4 DNA ligase. Restriction endonuclease linker sequences can for example, then be used to insert the synthetic gene into any one of a variety of recombinant DNA vectors suitable for protein expression. In another, similar method, a series of overlapping oligonucleotides are prepared by chemical oligonucleotide synthesis methods. Annealing of these oligonucleotides results in a gapped DNA structure. DNA synthesis catalyzed by enzymes such as DNA polymerase I can be used to fill in these gaps, and ligation is used to seal any nicks in the duplex structure. PCR and/or other DNA amplification techniques can be applied to amplify the formed linear DNA duplex.

[0403] Additional nucleotide sequences can be joined to an HGF isoform-encoding nucleic acid molecule, including linker sequences containing restriction endonuclease sites for the purpose of cloning the synthetic gene into a vector, for example, a protein expression vector or a vector designed for the amplification of the core protein coding DNA sequences. Furthermore, additional nucleotide sequences specifying functional DNA elements can be operatively linked to an isoform-encoding nucleic acid molecule. Examples of such sequences include, but are not limited to, promoter sequences designed to facilitate intracellular protein expression, and secretion sequences designed to facilitate protein secretion. Additional nucleotide sequences such as sequences specifying protein binding regions also can be linked to isoform-encoding nucleic acid molecules. Such regions include, but are not limited to, sequences to facilitate uptake of an isoform into specific target cells, or otherwise enhance the pharmacokinetics of the synthetic gene.

[0404] HGF isoforms also can be synthesized using automated synthetic polypeptide synthesis. Cloned and/or in silico-generated polypeptide sequences can be synthesized in fragments and then chemically linked. Alternatively, isoforms can be synthesized as a single polypeptide. Such polypeptides then can be used in the assays and treatment administrations described herein.

[0405] 2. Methods of Cloning and Isolating HGF Isoforms

[0406] HGF isoforms can be cloned or isolated using any available methods known in the art for cloning and isolating nucleic acid molecules. Such methods include PCR amplification of nucleic acids and screening of libraries, including nucleic acid hybridization screening, antibody-based screening and activity-based screening.

[0407] Methods for amplification of nucleic acids can be used to isolate nucleic acid molecules encoding an isoform, including for example, polymerase chain reaction (PCR) methods. A nucleic acid containing material can be used as a starting material from which an isoform-encoding nucleic acid molecule can be isolated. For example, DNA and mRNA preparations, cell extracts, tissue extracts, fluid samples (e.g. blood, serum, saliva), and samples from healthy and/or diseased subjects can be used in amplification methods. Nucleic acid libraries also can be used as a source of starting material. Primers can be designed to amplify an isoform. For example, primers can be designed based on expressed sequences from which an isoform is generated. Primers can be designed based on back-translation of an isoform amino acid sequence. Nucleic acid molecules generated by amplification can be sequenced and confirmed to encode an isoform.

[0408] Nucleic acid molecules encoding isoforms also can be isolated using library screening. For example, a nucleic acid library representing expressed RNA transcripts such as cDNA molecules can be screened by hybridization with nucleic acid molecules encoding HGF isoforms or portions thereof. For example, an intron sequence or portion thereof from an HGF gene can be used to screen for intron retention containing molecules based on hybridization to homologous sequences. Expression library screening can be used to isolate nucleic acid molecules encoding an HGF isoform. For example, an expression library can be screened with antibodies that recognize a specific isoform or a portion of an isoform. Antibodies can be obtained and/or prepared which specifically bind an HGF isoform or a region or peptide contained in an isoform. Antibodies which specifically bind an isoform can be used to screen an expression library containing nucleic acid molecules encoding an isoform. Exemplary methods for producing isoform-specific antibodies are described below.

[0409] 3. Expression Systems

[0410] HGF isoforms, including natural and combinatorial intron fusion proteins, can be produced by any method known to those of skill in the art including in vivo and in vitro methods. HGF isoforms can be expressed in any organism suitable to produce the required amounts and forms of HGF isoforms needed for administration and treatment. Expression hosts include prokaryotic and eukaryotic organisms such as E. coli, yeast, plants, insect cells, mammalian cells, including human cell lines and transgenic animals. Expression hosts can differ in their protein production levels as well as the types of post-translational modifications that are present on the expressed proteins. The choice of expression host can be made based on these and other factors, such as regulatory and safety considerations, production costs and the need and methods for purification.

[0411] Many expression vectors are available and known to those of skill in the art and can be used for expression of HGF isoforms. The choice of expression vector will be influenced by the choice of host expression system. In general, expression vectors can include transcriptional promoters and optionally enhancers, translational signals, and transcriptional and translational termination signals. Expression vectors that are used for stable transformation typically have a selectable marker which allows selection and maintenance of the transformed cells. In some cases, an origin of replication can be used to amplify the copy number of the vector.

[0412] HGF isoforms also can be utilized or expressed as protein fusions. For example, an isoform fusion can be generated to add additional functionality to an isoform. Examples of isoform fusion proteins include, but are not limited to, fusions of a signal sequence, a tag such as for localization, e.g. a his₆ tag or a myc tag, or a tag for purification, for example, a GST fusion, and a sequence for directing protein secretion and/or membrane association.

[0413] a. Prokaryotic Expression

[0414] Prokaryotes, especially E. coli, provide a system for producing large amounts of proteins such as HGF isoforms. Transformation of E. coli is simple and rapid technique well known to those of skill in the art. Expression vectors for E. coli can contain inducible promoters, such promoters are useful for inducing high levels of protein expression and for expressing proteins that exhibit some toxicity to the host cells. Examples of inducible promoters include the lac promoter, the trp promoter, the hybrid tac promoter, the T7 and SP6 RNA promoters and the temperature regulated λPL promoter.

[0415] Isoforms can be expressed in the cytoplasmic environment of E. coli. The cytoplasm is a reducing environment and for some molecules, this can result in the formation of insoluble inclusion bodies. Reducing agents such as dithiothreotol and β-mercaptoethanol and denaturants, such as guanidine-HCl and urea can be used to resolubilize the proteins. An alternative approach is the expression of HGF isoforms in the periplasmic space of bacteria which provides an oxidizing environment and chaperonin-like and disulfide isomerases and can lead to the production of soluble protein. Typically, a leader sequence is fused to the protein to be expressed which directs the protein to the periplasm. The leader is then removed by signal peptidases inside the periplasm. Examples of periplasmic-targeting leader sequences include the pelB leader from the pectate lyase gene and the leader derived from the alkaline phosphatase gene. In some cases, periplasmic expression allows leakage of the expressed protein into the culture medium. The secretion of proteins allows quick and simple purification from the culture supernatant. Proteins that are not secreted can be obtained from the periplasm by osmotic lysis. Similar to cytoplasmic expression, in some cases proteins can become insoluble and denaturants and reducing agents can be used to facilitate solubilization and refolding. Temperature of induction and growth also can influence expression levels and solubility, typically temperatures between 25° C. and 37° C. are used. Typically, bacteria produce aglycosylated proteins. Thus, if proteins require glycosylation for function, glycosylation can be added in vitro after purification from host cells.

[0416] b. Yeast

[0417] Yeasts such as Saccharomyces cerevisae, Schizosaccharomyces pombe, Yarrowia lipolytica, Kluyveromyces lactis and Pichia pastoris are well known yeast expression hosts that can be used for production of HGF isoforms. Yeast can be transformed with episomal replicating vectors or by stable chromosomal integration by homologous recombination. Typically, inducible promoters are used to regulate gene expression. Examples of such promoters include GAL1, GAL7 and GAL5 and metallothionein promoters, such as CUP1, AOX1 or other Pichia or other yeast promoter. Expression vectors often include a selectable marker such as LEU2, TRP1, HIS3 and URA3 for selection and maintenance of the transformed DNA. Proteins expressed in yeast are often soluble. Co-expression with chaperonins such as Bip and protein disulfide isomerase can improve expression levels and solubility. Additionally, proteins expressed in yeast can be directed for secretion using secretion signal peptide fusions such as the yeast mating type alpha-factor secretion signal from Saccharomyces cerevisae and fusions with yeast cell surface proteins such as the Aga2p mating adhesion receptor or the Arxula adeninivorans glucoamylase. A protease cleavage site such as, for example, the Kex-2 protease, can be engineered to remove the fused sequences from the expressed polypeptides as they exit the secretion pathway. Yeast also are capable of glycosylation at Asn-X-Ser/Thr motifs.

[0418] C. Insect Cells

[0419] Insect cells, particularly using baculovirus expression, are useful for expressing polypeptides such as HGF isoforms. Insect cells express high levels of protein and are capable of most of the post-translational modifications used by higher eukaryotes. Baculovirus have a restrictive host range which improves the safety and reduces regulatory concerns of eukaryotic expression. Typical expression vectors use a promoter for high level expression such as the polyhedrin promoter of baculovirus. Commonly used baculovirus systems include the baculoviruses such as Autographa californica nuclear polyhedrosis virus (AcNPV), and the Bombyx mori nuclear polyhedrosis virus (BmNPV) and an insect cell line such as Sf9 derived from Spodoptera frugiperda, Pseudaletia unipuncta (A7S) and Danaus plexippus (DpN1). For high-level expression, the nucleotide sequence of the molecule to be expressed is fused immediately downstream of the polyhedrin initiation codon of the virus. Mammalian secretion signals are accurately processed in insect cells and can be used to secrete the expressed protein into the culture medium. In addition, the cell lines Pseudaletia unipuncta (A7S) and Danaus plexippus (DpN1) produce proteins with glycosylation patterns similar to mammalian cell systems.

[0420] An alternative expression system in insect cells is the use of stably transformed cells. Cell lines such as the Schnieder 2 (S2) and Kc cells (Drosophila melanogaster) and C7 cells (Aedes albopictus) can be used for expression. The Drosophila metallothionein promoter can be used to induce high levels of expression in the presence of heavy metal induction with cadmium or copper. Expression vectors are typically maintained by the use of selectable markers such as neomycin and hygromycin.

[0421] d. Mammalian Cells

[0422] Mammalian expression systems can be used to express HGF isoforms. Expression constructs can be transferred to mammalian cells by viral infection such as adenovirus or by direct DNA transfer such as liposomes, calcium phosphate, DEAE-dextran and by physical means such as electroporation and microinjection. Expression vectors for mammalian cells typically include an mRNA cap site, a TATA box, a translational initiation sequence (Kozak consensus sequence) and polyadenylation elements. Such vectors often include transcriptional promoter-enhancers for high-level expression, for example the SV40 promoter-enhancer, the human cytomegalovirus (CMV) promoter and the long terminal repeat of Rous sarcoma virus (RSV). These promoter-enhancers are active in many cell types. Tissue and cell-type promoters and enhancer regions also can be used for expression. Exemplary promoter/enhancer regions include, but are not limited to, those from genes such as elastase I, insulin, immunoglobulin, mouse mammary tumor virus, albumin, alpha fetoprotein, alpha-1-antitrypsin, beta globin, myelin basic protein, myosin light chain 2, and gonadotropic releasing hormone gene control. Selectable markers can be used to select for and maintain cells with the expression construct. Examples of selectable marker genes include, but are not limited to, hygromycin B phosphotransferase, adenosine deaminase, xanthine-guanine phosphoribosyl transferase, aminoglycoside phosphotransferase, dihydrofolate reductase and thymidine kinase. Fusion with cell surface signaling molecules such as TCR-ζ and Fc_{ε}RI-γ can direct expression of the proteins in an active state on the cell surface.

[0423] Many cell lines are available for mammalian expression including mouse, rat human, monkey, chicken and hamster cells. Exemplary cell lines include but are not limited to CHO, Balb/3T3, HeLa, MT2, mouse NS0 (nonsecreting) and other myeloma cell lines, hybridoma and heterohybridoma cell lines, lymphocytes, fibroblasts, Sp2/0, COS, NIH3T3, HEK293, 293S, 2B8, and HKB cells. Cell lines also are available adapted to serum-free media which facilitates purification of secreted proteins from the cell culture media. One such example is the serum free EBNA-1 cell line (Pham et al., (2003) Biotechnol. Bioeng. 84:332-42.)

[0424] e. Plants

[0425] Transgenic plant cells and plants can be used to express HGF isoforms. Expression constructs are typically transferred to plants using direct DNA transfer such as microprojectile bombardment and PEG-mediated transfer into protoplasts, and with agrobacterium-mediated transformation. Expression vectors can include promoter and enhancer sequences, transcriptional termination elements and translational control elements. Expression vectors and transformation techniques are usually divided between dicot hosts, such as Arabidopsis and tobacco, and monocot hosts, such as corn and rice. Examples of plant promoters used for expression include the cauliflower mosaic virus promoter, the nopaline synthase promoter, the ribose bisphosphate carboxylase promoter and the ubiquitin and UBQ3 promoters. Selectable markers such as hygromycin, phosphomannose isomerase and neomycin phosphotransferase are often used to facilitate selection and maintenance of transformed cells. Transformed plant cells can be maintained in culture as cells, aggregates (callus tissue) or regenerated into whole plants. Transgenic plant cells also can include algae engineered to produce CSR isoforms (see for example, Mayfield et al. (2003) PNAS 100:438-442). Because plants have different glycosylation patterns than mammalian cells, this can influence the choice of CSR isoforms produced in these hosts.

### G. Isoform Conjugates

[0426] A variety of synthetic conjugates of HGF isoforms are provided. In one example, HGF isoforms are provided as fusion proteins whereby an HGF isoform is linked directly or indirectly to another polypeptide, such as a polypeptide that promotes secretion of an isoform or to a multimerization domain. In some examples, a fusion protein can result in a chimeric polypeptide. For example, a chimera can include a polypeptide in which the extracellular domain portion and C-terminal portion, such as an intron encoded portion, are from different isoforms. Also included among synthetic forms are conjugates in which the isoform or intron-encoded portion thereof is linked directly or via a linker to another agent, such as a targeting agent or target agent or to any other molecule that presents an HGF isoform or intron-encoded portion of an HGF isoform to a cell surface receptor (CSR), such as MET, so that an activity of the CSR is modulated. Also provided are “peptidomimetic” isoforms in which one or more bonds in the peptide backbone is (are) replaced by a bioisostere or other bond such that the resulting polypeptide peptidomimetic has improved properties, such as resistance to proteases, compared to the unmodified form.

[0427] HGF isoform conjugates can be designed and produced with one or more modified properties. These properties include, but are not limited to, increased production including increased secretion or expression. For example, an HGF isoform can be modified to exhibit improved secretion compared to an unmodified HGF isoform. Other properties include increased protein stability, such as an increased protein half-life, increased thermal tolerance and/or resistance to one or more proteases, and increased ability to dimerize or form multimers. For example, an HGF isoform can be modified to increase protein stability in vitro and/or in vivo. In vivo stability can include protein stability under particular administration conditions such as stability in blood, saliva, and/or digestive fluids.

[0428] HGF isoforms also can be modified to exhibit modified properties without producing a conjugated polypeptide using any methods known in the art for modification of proteins. Such methods can include site-directed and random mutagenesis. Non-natural amino acids and/or non-natural covalent bonds between amino acids of the polypeptide can be introduced into an HGF isoform to increase protein stability. In such modified HGF isoforms, the biological function of the isoform can remain unchanged compared to the unmodified isoform. In some examples, a modified HGF isoform also can be provided as a conjugate such as a fusion protein, chimeric protein, or other conjugate provided herein. Assays such as the assays for biological function provided herein and known in the art can be used to assess the biological function of a modified HGF isoform.

[0429] Linkage of a synthetic HGF isoform as a fusion protein or synthetic conjugate can be direct or indirect. In some examples, linkage can be facilitated by nucleic acid linkers such as restriction enzyme linkers, or other peptide linkers that promote the folding or stability of an encoded polypeptide. Linkage of a polypeptide conjugate also can be by chemical linkage or facilitated by heterobifunctional linkers, such as any known in the art or provided herein. Exemplary peptide linkers and heterobifunctional cross-linking reagents are provided below. For example, exemplary peptide linkers include, but are not limited to, (Gly4Ser)n, (Ser4Gly)n and (AlaAlaProAla)n (see e.g., SEQ ID NO. 270) in which n is 1 to 4, such as 1, 2, 3 or 4, such as:

| | |
|---|---|
| (1) | Gly4Ser with NcoI ends SEQ ID NO. 266 |
| | CCATGGGCGG CGGCGGCTCT GCCATGG |
| (2) | (Gly4Ser)2 with NcoI ends SEQ ID NO. 267 |
| | CCATGGGCGG CGGCGGCTCT GGCGGCGGCG GCTCTGCCAT GG |
| (3) | (Ser4Gly)4 with NcoI ends SEQ ID NO. 268 |
| | CCATGGCCTC GTCGTCGTCG GGCTCGTCGT CGTCGGGCTC |
| | GTCGTCGTCG GGCTCGTCGT CGTCGGGCGC CATGG |
| (4) | (Ser4Gly)2 with NcoI ends SEQ ID NO. 269 |
| | CCATGGCCTC GTCGTCGTCG GGCTCGTCGT CGTCGGGCGC |
| | CATGG |
| (5) | (AlaAlaProAla)n, where n is 1 to 4, such as 2 |
| | or 3 (see e.g., SEQ ID NO:270) |

[0430] Numerous heterobifunctional cross-linking reagents that are used to form covalent bonds between amino groups and thiol groups and to introduce thiol groups into proteins, are known to those of skill in this art (see, e.g., the PIERCE CATALOG, ImmunoTechnology Catalog & Handbook, 1992-1993, which describes the preparation of and use of such reagents and provides a commercial source for such reagents; see, also, e.g., Cumber et al. (1992) Bioconjugate Chem. 3:397-401; Thorpe et al. (1987) Cancer Res. 47:5924-5931; Gordon et al. (1987) Proc. Natl. Acad Sci. 84:308-312; Walden et al. (1986) J. Mol. Cell Immunol. 2:191-197; Carlsson et al. (1978) Biochem. J. 173: 723-737; Mahan et al. (1987) Anal. Biochem. 162:163-170; Wawrzynczak et al. (1992) Br. J. Cancer 66:361-366; Fattom et al. (1992) Infection & Immun. 60:584-589). These reagents may be used to form covalent bonds between the N-terminal portion and C-terminus intron-encoded portion or between each of those portions and a linker. These reagents include, but are not limited to: N-succinimidyl-3-(2-pyridyldithio)propionate (SPDP; disulfide linker); sulfosuccinimidyl 6-[3-(2-pyridyldithio)propion [symbol] amido]hexanoate (sulfo-LC-SPDP); succinimidyloxycarbonyl-α-methyl benzyl thiosulfate (SMBT, hindered disulfate linker); succinimidyl 6-[3-(2-pyridyldithio)propionami [symbol] do] [symbol] hexanoate (LC-SPDP); sulfosuccinimidyl 4-(N-maleimidomethyl)cyclohexane-1-carboxylate (sulfo-SMCC); succinimi [symbol] dyl 3-(2-pyridyldithio)butyrate (SPDB; hindered disulfide bond linker); sulfosuccinimidyl 2-(7-azido-4-methylcoumarin-3-acetamide) ethyl-1,3′-dithiopropionate (SAED); sulfo-succinimidyl 7-azido-4-methylcoumarin-3-acetate (SAMCA); sulfosuccinimidyl-6-[alpha-methyl-alpha-(2-pyridyldithio)toluamido]-hexanoate (sulfo-LC-SMPT); 1,4-di-[3′-(2′-pyridyldithio)propion-amido]butane (DPDPB); 4-succinimidyloxycarbonyl-α-methyl-α-(2-pyridylthio)toluene (SMPT, hindered disulfate linker); sulfosuccinimidyl-6-[α-methyl-α-(2-pyrimiyldi-thio)toluamido]hexanoate (sulfo-LC-SMPT); m-maleimidobenzoyl-N-hydroxy-succinimide ester (MBS); m-maleimidobenzoyl-N-hydroxysulfo-succinimide ester (sulfo-MBS); N-succinimidyl(4-iodoacetyl)aminobenzoate (SIAB; thioether linker); sulfosuccinimidyl-(4-iodoacetyl)amino benzoate (sulfo-SIAB); succinimidyl-4-(p-maleimi-dophenyl)butyrate (SMPB); sulfosuccinimidyl-4-(p-maleimido-phenyl)butyrate (sulfo-SMPB); azidobenzoyl hydrazide (ABH). These linkers, for example, can be used in combination with peptide linkers, such as those that increase flexibility or solubility or that provide for or eliminate steric hindrance. Any other linkers known to those of skill in the art for linking a polypeptide molecule to another molecule can be employed. General properties are such that the resulting molecule is biocompatible (for administration to animals, including humans) and such that the resulting molecule modulates the activity of a cell surface molecule, such as a MET receptor, angiogenic molecule, or other cell surface molecule or receptor.

[0431] Pharmaceutical compositions can be prepared that contain HGF isoform conjugates and treatment effected by administering a therapeutically effective amount of a conjugate, for example, in a physiologically acceptable excipient. HGF isoform conjugates also can be used in in vivo therapy methods such as by delivering a vector containing a nucleic acid encoding an HGF isoform conjugate as a fusion protein.

[0432] 1. Isoform Fusions

[0433] HGF isoform fusions include operative linkage of a nucleic acid sequence encoding HGF with another nucleic acid molecule. Nucleic acid molecules that can be joined to an HGF isoform, include but are not limited to, promoter sequences designed to facilitate intracellular protein expression, secretion sequences designed to facilitate protein secretion, regulatory sequences for regulating transcription and translation, molecules that regulate the serum stability of an encoded polypeptide such as portions of CD45 or an Fc portion of an immunoglobulin, and other polypeptide-encoding nucleic acid molecules such as those encoding a targeted agent or targeting agent, or those encoding all or part of another ligand or cell surface receptor intron fusion protein. The fusion sequence can be a component of an expression vector, or it can be part of an isoform nucleic acid sequence that is inserted into an expression vector. The fusion can result in a chimeric protein encoded by two or more genes, or the fusion can result in a protein sequence encoding only an HGF isoform polypeptide, such as if the fused sequence is a signal sequence that is cleaved off following secretion of the polypeptide into the secretory pathway. In one example, a nucleic acid fused to all or part of an HGF isoform can include any nucleic acid sequence that improves the production of an isoform such as a promoter sequence, epitope or fusion tag, or a secretion signal. In another example, an HGF isoform fusion can include fusion with a targeted agent or targeting agent to produce an HGF isoform conjugate such as described below. Additionally, a nucleic acid encoding all or part of an HGF isoform can be joined to a nucleic acid encoding another ligand or cell surface receptor intron fusion isoform, or intron portion thereof, thereby generating a chimeric intron fusion protein. Exemplary HGF chimeras are described below. HGF isoform-multimerization domain, such Fc domains, fusions are provided.

[0434] Encoded HGF isoform fusion proteins can contain additional amino acids which do not adversely affect the activity of a purified isoform protein. For example, additional amino acids can be included in the fusion protein as a linker sequence which separate the encoded isoform protein from the encoded fusion sequence in order to provide, for example, a favored steric configuration in the fusion protein. The number of such additional amino acids which may serve as separators may vary, and generally do not exceed 60 amino acids. Exemplary linker sequences are provided below. In another example, a fusion protein can contain amino acid residues encoded by a restriction enzyme linker sequence. In an additional example, an isoform fusion protein can contain selective cleavage sites at the junction or junctions between the fusion of an HGF isoform with another molecule. For example, such selective cleavage sites may comprise one or more amino acid residues which provide a site susceptible to selective enzymatic, proteolytic, chemical, or other cleavage. In one example, the additional amino acids can be a recognition site for cleavage by a site-specific protease. The fusion protein can be further processed to cleave the fused polypeptide therefrom; for example, if the isoform protein is fused to an epitope tag but is required without additional amino acids such as for therapeutic purposes.

[0435] a. HGF Isoform Fusions for Improved Production of HGF Isoform Polypeptides

[0436] Provided herein are nucleic acid sequences encoding HGF fusion polypeptides for the improved production of an HGF isoform. A nucleic acid of an HGF isoform, such as set forth in any one of SEQ ID NOS: 9, 11, 13, 17, or 19 can be fused to a homologous or heterologous precursor sequence that substitutes for and/or provides for a functional secretory sequence. Other exemplary HGF isoforms can include other natural and engineered isoform variants of a cognate HGF such as set forth in any one of SEQ ID NOS: 21, 23, 25, 27, 29, and 31 and encoding a polypeptide set forth in any one of SEQ ID NOS: 22, 24, 26, 28, 30, or 32. In one example, an isoform, such as an intron fusion protein isoform, containing a native endogenous precursor signal sequence of a cognate HGF ligand can have its precursor sequence replaced with a heterologous or homologous precursor sequence, such as a precursor sequence of tissue plasminogen activator or any other signal sequence known to one of skill in the art, to improve the secretion and production of an HGF isoform polypeptide. The precursor sequence is most effectively utilized by locating it at the N-terminus of a recombinant protein to be secreted from the host cell. A nucleic acid precursor sequence can be operatively joined to a nucleic acid containing the coding region of an HGF isoform in such a manner that the precursor sequence coding region is upstream of (that is, 5′ of), and in the same reading frame as, the isoform coding region to provide an isoform fusion. The isoform fusion can be expressed in a host cell to provide a fusion polypeptide comprising the precursor sequence joined, at its carboxy terminus, to an HGF isoform at its amino terminus. The fusion polypeptide can be secreted from a host cell. Typically, a precursor sequence is cleaved from the fusion polypeptide during the secretion process, resulting in the accumulation of a secreted isoform in the external cellular environment or, in some cases, in the periplasmic space.

[0437] Optionally an HGF isoform, including an intron fusion protein that is a fusion nucleic acid also can include operative linkage with another nucleic acid sequence or sequences, such as a sequence that encodes a fusion tag, that promotes the purification and/or detection of an isoform polypeptide. Non-limiting examples of fusion tags include a myc tag, Poly-His tag, GST tag, Flag tag, fluorescent or luminescent moiety such as GFP or luciferase, or any other epitope or fusion tag known to one of skill in the art. In other embodiments, a nucleic acid sequence of an HGF isoform can contain an endogenous signal sequence and can include fusion with a nucleic acid sequence encoding a fusion tag or tags. Many precursor sequences, including signal sequences and prosequences, and/or fusion tag sequences have been identified and are known in the art, such as but not limited to, those provided and described herein, and are contemplated to be used in conjunction with an isoform nucleic acid molecule. A precursor sequence may be homologous or heterologous to an isoform gene or cDNA, or a precursor sequence can be chemically synthesized. In most cases, the secretion of an isoform polypeptide from a host cell via the presence of a signal peptide and/or propeptide will result in the removal of the signal peptide or propeptide from the secreted intron fusion protein polypeptide.

[0438] i. Tissue Plasminogen Activator

[0439] Tissue plasminogen activator (tPA) is a serine protease that regulates hemostasis by converting the zymogen plasminogen to its active form, plasmin. Like other serine proteases, tPA is synthesized and secreted as an inactive zymogen that is activated by proteolytic processing. Specifically, the mature partially active single chain zymogen form of tPA can be further processed into a two-chain fully active form by cleavage after Arg-310 of SEQ ID NO:255 catalyzed by plasmin, tissue kallikrein or factor Xa. tPA is secreted into the blood by endothelial cells in areas immediately surrounding blood clots, which are areas rich in fibrin. tPA regulates fibrinolysis due to its high catalytic activity for the conversion of plasminogen to plasmin, a regulator of fibrin clots. Plasmin also is a serine protease that becomes converted into a catalytically active, two-chain form upon cleavage of its zymogen form by tPA. Plasmin functions to degrade the fibrin network of blood clots by cutting the fibrin mesh at various places, leading to the production of circulating fragments that are cleared by other proteinases or by the kidney and liver.

[0440] The precursor polypeptide of tPA includes a pre-sequence and pro-sequence encoded by residues 1-35 of a full-length tPA sequence set forth in SEQ ID NO:255 and exemplified in SEQ ID NO:253. The precursor sequence of tPA contains a signal sequence including amino acids 1-23 and also contains two pro-sequences including amino acids 24-32 and 33-35 of an exemplary tPA sequence set forth in SEQ ID NO: 253 or 255. The signal sequence of tPA is cleaved co-translationally in the ER and a pro-sequence is removed in the Golgi apparatus by cleavage at a furin processing site following the sequence RFRR occurring at amino acids 29-32 of the exemplary sequences set forth in SEQ ID NO:253 or 255. Furin cleavage of a tPA pro-sequence retains a three amino acid pro-sequence and exopeptidase cleavage site GAR, set forth as amino acids 33-35 of an exemplary tPA sequence set forth in SEQ ID NO: 253 or 255, within a mature polypeptide tPA sequence. The cleavage of the retained pro-sequence site is mediated by a plasmin-like extracellular protease to obtain a mature tPA polypeptide beginning at Ser36 set forth in SEQ ID NO:253 or 255. Inclusion of a protease inhibitor, such as for example aprotinin, in the culture medium can prevent exopeptidases cleavage and thereby retain a GAR pro-sequence in the mature polypeptide of tPA (Berg et al., (1991) Biochem Biophys Res Comm, 179:1289).

[0441] Typically, tPA is secreted by the constitutive secretory pathway, although in some cells tPA is secreted in a regulated manner. For example, in endothelial cells regulated secretion of tPA is induced following endothelial cell activation, for example, by histamine, platelet-activating factor or purine nucleotides, and requires intraendothelial Ca2+ and cAMP signaling (Knop et al., (2002) Biochem Biophys Acta 1600:162). In other cells, such as for example neural cells, specific stimuli that can induce secretion of tPA include exercise, mental stress, electroconvulsive therapy, and surgery (Parmer et al., (1997) J Biol Chem 272:1976). The mechanism mediating the regulated secretion of tPA requires signals on the tPA polypeptide itself, whereas the signal sequence of tPA efficiently mediates constitutive secretion of tPA since a GFP molecule operatively linked only to the signal sequence of tPA is constitutively secreted in the absence of carbachol stimulation (Lochner et al., (1998) Mol Biol Cell, 9:2463). In the absence of a tPA signal sequence, a tPA/GFP hybrid protein is not secreted from cells.

[0442] An exemplary tPA precursor sequence including a pre/propeptide sequence of tPA is set forth in SEQ ID NO: 253, and is encoded by a nucleic acid sequence set forth in SEQ ID NO:252. The signal sequence of tPA includes amino acids 1-23 of SEQ ID NO:255 and the pro-sequence includes amino acids 24-35 of SEQ ID NO:255 whereby a furin-cleaved pro-sequence includes amino acids 24-32 and a plasmin-like exoprotease-cleaved pro-sequence includes amino acids 33-35. Allelic variants of a tPA pre/prosequence are also provided herein, such as those set forth in SEQ ID NOS:256 or 257. Further, isoform protein fusions of a pre/prosequence of tPA of mammalian and non-mammalian origin are contemplated and exemplary sequences are set forth in SEQ ID NOS:258-265.

[0443] ii. tPA-HGF Isoform Fusions

[0444] Provided herein are nucleic acid sequences encoding tPA-HGF isoform polypeptides, for the improved production of an HGF intron fusion protein isoform. Nucleic acid sequences encoding HGF isoforms, including intron fusion protein isoforms of HGF, or allelic variants thereof, such as any one of SEQ ID NOS: 9, 11, or 13, encoding amino acids set forth in SEQ ID NOS:10, 12, 14, 18, or 20 operatively linked to a tPA pre/prosequence are provided. A tPA pre/prosequence can include a tPA pre/prosequence set forth as SEQ ID NO:252 encoding amino acids set forth as 1-35 in SEQ ID NO:253. In some examples, a tPA pre/pro sequence can replace the endogenous precursor signal sequence of HGF and/or provide for an optimal precursor sequence for the secretion of an intron fusion protein polypeptide.

[0445] In other embodiments, an HGF isoform or allelic variants thereof, set forth in any one of SEQ ID NOS: 9, 11, or 13, encoding amino acids set forth in SEQ ID NOS:10, 12, 14, 18, or 20, can be operatively linked to part of a tPA pre/prosequence including the nucleic acid sequence up to the furin cleavage site of a pre/prosequence of tPA (encoded amino acids 1-32 of an exemplary tPA pre-prosequence set forth in SEQ ID NO:253), thereby excluding nucleic acids encoding amino acids GAR (encoded amino acids 33-35 of an exemplary tPA pre-prosequence set forth in SEQ ID NO:253). Additionally, a nucleic acid sequence of an HGF isoform or allelic variants thereof, such as set forth in any one of SEQ ID NOS: 9, 11, or 13, encoding amino acids set forth in SEQ ID NOS:10, 12, 14, 18, or 20, can include operative linkage with allelic variants of all or part of a tPA pre/prosequence, such as set forth in SEQ ID NOS: 252 or 253 or can include operative linkage with all or part of other tPA pre/prosequences of mammalian and non-mammalian origin, such as set forth in any one of SEQ ID NOS:258-265. HGF intron fusion protein-tPA pre/pro fusion sequences provided herein can exhibit enhanced cellular expression and secretion of an HGF isoform polypeptide for improved production.

[0446] In another embodiment, a nucleic acid sequence encoding an HGF isoform or allelic variant thereof, such as any one of SEQ ID NOS: 9, 11, or 13, encoding amino acids set forth in SEQ ID NOS:10, 12, 14, 18, or 20, can include operative linkage with a presequence (signal sequence) only of a tPA pre/prosequence such as an exemplary signal sequence encoding amino acids 1-23 of an exemplary tPA pre/prosequence set forth as SEQ ID NO:253. HGF intron fusion protein-tPA presequence fusions provided herein can exhibit enhanced cellular expression and secretion of an HGF isoform polypeptide for improved production.

[0447] In an additional embodiment, a nucleic acid sequence encoding an HGF isoform or allelic variant thereof, such as any one of SEQ ID NOS: 9, 11, or 13, encoding amino acids set forth in SEQ ID NOS:10, 12, 14, 18, or 20, that contains an endogenous signal sequence of a cognate HGF ligand can include a fusion with a tPA prosequence where insertion of a tPA prosequence is between the HGF isoform endogenous signal sequence and the HGF isoform coding sequence. In one example, a tPA prosequence includes a nucleic acid sequence encoding amino acids 24-32 of an exemplary tPA pre/prosequence set forth as SEQ ID NO:253. In another example, a tPA pro-sequence includes a nucleic acid sequence encoding amino acids 33-35 of an exemplary tPA pre/prosequence set forth as SEQ ID NO:253. In an additional example, a tPA prosequence includes a nucleic acid sequence encoding amino acids 24-35 of an exemplary tPA pre/prosequence set forth as SEQ ID NO:253. Other tPA prosequences can include amino acids 24-32, 33-35, or 24-35 of allelic variants of tPA pre/prosequences such as set forth in SEQ ID NOS:256 or 257. HGF intron fusion protein-tPA prosequence fusions provided herein can exhibit enhanced cellular expression and secretion of an HGF isoform polypeptide for improved production.

[0448] Additionally, an HGF isoform, HGF intron fusion protein-tPA pre/prosequence fusion, HGF intron fusion protein-tPA presequence fusion, and/or an HGF intron fusion protein-tPA prosequence fusion for the improved secretion of an intron fusion protein polypeptide can optionally also include one, two, three, or more fusion tags that facilitate the purification and/or detection of an HGF isoform polypeptide. Generally, a coding sequence for a specific tag can be spliced in frame on the amino or carboxy ends, with or without a linker region, with a coding sequence of a nucleic acid molecule encoding an HGF isoform polypeptide. When fusion is on an amino terminus of a sequence, a fusion tag can be placed between an endogenous or heterologous precursor sequence. In one embodiment a fusion tag, such as a c-myc tag, 8×His tag, or any other fusion tag known to one of skill in the art, can be placed between an HGF isoform endogenous signal sequence and an HGF coding sequence. In another embodiment, a fusion tag can be placed between a heterologous precursor sequence, such as a tPA pre/prosequence, presequence, or prosequence set forth in SEQ ID NO:252, and an HGF isoform coding sequence. In other embodiments, a fusion tag can be placed directly on the carboxy terminus of a nucleic acid encoding an HGF isoform fusion polypeptide sequence. In some instances, an HGF isoform fusion can contain a linker between an endogenous or heterologous precursor sequence and a fusion tag. HGF isoform fusions containing one or more fusion tag(s) provided herein, including HGF intron fusion protein-tPA fusions, can facilitate easier detection and/or purification of an HGF isoform polypeptide for improved production.

[0449] b. Chimeric and Synthetic Intron Fusion Polypeptides

[0450] Also provided are chimeric HGF fusion polypeptides. A chimeric HGF isoform is a protein encoded by all or part of two or more genes resulting in a polypeptide containing all or part of an encoded HGF sequence operatively linked to another polypeptide. Generally, a chimeric HGF isoform contains all or part of an HGF isoform, including an intron from an HGF intron fusion polypeptide, operatively linked at the N-terminus to another polypeptide or other molecule such that the resulting molecule modulates the activity of a cell surface molecule, particularly an RTK receptor or other angiogenic molecule, including any involved in pathways that participate in the inflammatory response, angiogenesis, neovascularization and/or cell proliferation. Included among these synthetic “polypeptides” are chimeric intron fusion polypeptides in which all or part of an HGF isoform is linked to all or part of an intron fusion protein, such as all or part of any one of the sequences and encoded amino acids as set forth as SEQ ID NOS:36-245. An exemplary chimeric intron fusion polypeptide includes all or part of an HGF isoform linked to an intron 8 portion of a herstatin (see, e.g., SEQ ID NOS:231-245 and encoded amino acids set forth in SEQ ID NOS:216-230). Exemplary herstatins, or intron 8 portions thereof, are set forth in SEQ ID NOS. 201-245. Table 4 below identifies the variations in the intron 8-encoded portion of a herstatin compared to a prominent intron 8 (SEQ ID NO: 216) included between amino acids 341-419 of the prominent herstatin molecule set forth as SEQ ID NO:186. The sequence identifiers (SEQ ID NOS) for exemplary intron 8 and herstatin molecules, including variants of an intron 8 or herstatin, are in parentheses. Other herstatin variants include allelic variants, particularly those with variation in the extracellular domain portion.

TABLE 4
Herstatin variants

| Intron 8 Variant | | Herstatin Variant | |
|---|---|---|---|
| Nucleotide | Amino Acid | Nucleotide | Amino Acid |
| Prominent (231) | Prominent (216) | Prominent (201) | Prominent (186) |
| nt 4 = T (232) | aa 2 = Ser (217) | nt 1036 = T (202) | aa 342 = Ser (187) |
| nt 14 = C (233) | aa 5 = Pro (218) | nt 1046 = C (203) | aa 345 = Pro (188) |
| nt 17 = T (234) | aa 6 = Leu (219) | nt 1049 = T (204) | aa 346 = Leu (189) |
| nt 47 = A (235) | aa 16 = Gln (220) | nt 1079 = A (205) | aa 356 = Gln (190) |
| nt 49 = T (236) | aa 17 = Cys (221) | nt 1081 = T (206) | aa 357 = Cys (191) |
| nt 52 = C (237) | aa 18 = Leu (222) | nt 1084 = C (207) | aa 358 = Leu (192) |
| n 54 = A (238) | aa 18 = Ile (223) | nt 1086 = A (208) | aa 358 = Ile (193) |
| nt 62 = C, T, A | aa 21 = Asp, Ala, | nt 1094 = C, T, A | aa 361 = Asp, Ala, |
| (239) | Val (224) | (209) | Val (194) |
| nt 92 = T (240) | aa 31 = Ile (225) | nt 1124 = T (210) | aa 371 = Ile (195) |
| nt 106 = A (241) | aa 36 = Ile (226) | nt 1138 = A (211) | aa 376 = Ile (196) |
| nt 161 = G (242) | aa 54 = Arg (227) | nt 1193 = G (212) | aa 394 = Arg (197) |
| nt 191 = T (243) | aa 64 = Leu (228) | nt 1223 = T (213) | aa 404 = Leu (198) |
| nt 217 = C or A | aa 73 = His or Asn | nt 1249 = C or A | aa 413 = His or |
| (244) | (229) | (214) | Asn (199) |
| nt 17 = T and | aa 6 = Leu and | nt 1049 = T and | aa 346 = Leu and |
| nt 217 = C or A | aa 73 = His or Asn | nt 1249 = C or A | aa 413 = His or |
| (245) | (230) | (215) | Asn (200) |

[0451] The N-terminus portion of an HGF isoform can be linked to a C-terminus (intron-encoded portion) of the synthetic intron fusion protein directly or via a linker, such as a polypeptide linker. For example, linkage can be effected by recombinant expression of a fusion protein where all or part of a nucleic acid encoding an HGF isoform is operatively linked at the 5′ end to all or part of a nucleic acid encoding another intron fusion protein. Linkage can be in the presence of an encoded peptide linker such as any linker described herein or known in the art, or in the presence of a restriction enzyme linker. An HGF isoform encoded polypeptide also can be linked or conjugated to all or part of another polypeptide by chemical linkage such as by using a heterobifunctional cross-linking reagent or any other linkage that can be effected chemically such as is described above for isoform conjugates.

[0452] Any suitable linker can be selected so long as the resulting HGF chimeric molecule interacts with a cell surface receptor such as a MET receptor or other cell surface molecule including angiogenic molecules and modulates, typically inhibits, the activity of the cell surface molecule. Linkers can be selected to add a desirable property, such as to increase serum stability, solubility and/or intracellular concentration and to reduce steric hindrance caused by close proximity where one or more linkers is (are) inserted between the N-terminal portion and intron-encoded portion. The resulting molecule is designed or selected to retain the ability to modulate the activity of a cell surface molecule, particularly RTKs or other angiogenic molecules, including any involved in pathways that are involved in inflammatory responses, neovascularization, angiogenesis and cell proliferation and tumor progression.

[0453] C. HGF Multimers and Multimerization Domains

[0454] Isoform multimers, including HGF multimers, can be covalently-linked, non-covalently-linked, or chemically linked multimers of one or more than one polypeptide to form dimers, trimers, or higher order multimers of the isoforms. The polypeptide components of the multimer can be the same or different. Typically, multimers provided herein are formed between any one or more of the HGF isoforms provided herein, such as for example any set forth in SEQ ID NOS: 10, 12, 14, 18, or 20. In some examples, a multimer can be formed between an HGF isoform and another CSR or ligand isoform. Exemplary CSR isoforms include, but are not limited to, peptides and nucleic acid molecules that encode the polypeptides set forth in SEQ ID NOS: 36-245 and variants thereof.

[0455] Multimers of polypeptides can be formed by dimerization, such as via interactions between Fc domains, or they can be covalently joined. Multimerization between two isoform polypeptides can be spontaneous, or can occur due to forced linkage of two or more polypeptides. In one example, multimers can be linked by disulfide bonds formed between cysteine residues on isoforms polypeptides. In an additional example, multimers can be formed between two polypeptides through chemical linkage, such as for example, by using heterobifunctional linkers.

[0456] i. Peptide Linkers

[0457] Peptide linkers can be used to produce polypeptide multimers. In one example, peptide linkers can be fused to the C-terminal end of a first polypeptide and the N-terminal end of a second polypeptide. This structure can be repeated multiples times such that at least one, preferably 2, 3, 4, or more soluble polypeptides are linked to one another via peptide linkers at their respective termini. For example, a multimer polypeptide can have a sequence Z₁-X-Z₂, where Z₁ and Z₂ are each a sequence of all or part of a CSR or ligand isoform and where X is a sequence of a peptide linker. In some instances, Z₁ and/or Z₂ is a all or part of an isoform polypeptide. In another example, Z₁ and Z₂ are the same or they are different. In another example, the polypeptide has a sequence of Z₁-X-Z₂(-X-Z)ₙ, where “n” is any integer, i.e. generally 1 or 2. Typically, the peptide linker is of sufficient length to so that the resulting polypeptide is soluble. Examples of peptide linkers include glycine serine polypeptides, such s-Gly-Gly-, GGGGG (SEQ ID NO:313), GGGGS (SEQ ID NO:311) or (GGGGS)n, SSSSG (SEQ ID NO:312) or (SSSSG)n.

[0458] Linking moieties are described, for example, in Huston et al. (1988) PNAS 85:5879-5883, Whitlow et al. (1993) Protein Engineering 6:989-995, and Newton et al., (1996) Biochemistry 35:545-553. Other suitable peptide linkers include any of those described in U.S. Pat. No. 4,751,180 or U.S. Pat. No. 4,935,233, which are hereby incorporated by reference. A polynucleotide encoding a desired peptide linker can be inserted anywhere in an isoform or at the N- or C-terminus or between a precursor sequence, such as for example, a t-PA preprosequence, in frame, using any suitable conventional technique.

[0459] ii. Polypeptide Multimerization Domains

[0460] Interaction of two or more polypeptides can be facilitated by their linkage, either directly or indirectly, to any moiety or other polypeptide that are themselves able to interact to form a stable structure. For example, separate encoded polypeptide chains can be joined by multimerization, whereby multimerization of the polypeptides is mediated by a multimerization domain. Typically, the multimerization domain provides for the formation of a stable protein-protein interaction between a first chimeric polypeptide and a second chimeric polypeptide. Chimeric polypeptides include, for example, linkage (directly or indirectly) of a nucleic acid encoding an isoform polypeptide with a nucleic acid encoding a multimerization domain. Homo- or heteromultimeric polypeptides can be generated from co-expression of separate chimeric polypeptides. The first and second chimeric polypeptides can be the same or different.

[0461] Generally, a multimerization domain includes any capable of forming a stable protein-protein interaction. The multimerization domains can interact via an immunoglobulin sequence, leucine zipper, a hydrophobic region, a hydrophilic region, or a free thiol which forms an intermolecular disulfide bond between the chimeric molecules of a homo- or heteromultimer. In addition, a multimerization domain can include an amino acid sequence comprising a protuberance complementary to an amino acid sequence comprising a hole, such as is described, for example, in U.S. patent application Ser. No. 08/399,106. Such a multimerization region can be engineered such that steric interactions not only promote stable interaction, but further promote the formation of heterodimers over homodimers from a mixture of chimeric monomers. Generally, protuberances are constructed by replacing small amino acid side chains from the interface of the first polypeptide with larger side chains (e.g., tyrosine or typtophan). Compensatory cavities of identical or similar size to the protuberances are optionally created on the interface of the second polypeptide by replacing large amino acid side chains with smaller ones (e.g., alanine or threonine).

[0462] A chimeric isoform polypeptide, such as for example an any HGF isoform polypeptide provided herein, can be joined anywhere, but typically via its N- or C-terminus, to the N- or C-terminus of a multimerization domain to ultimately, upon expression, form a chimeric polypeptide.

[0463] The resulting chimeric polypeptides, and multimers formed therefrom, can be purified by any suitable method, such as, for example, by affinity chromatography over Protein A or Protein G columns. Where two nucleic acid molecules encoding different chimeric polypeptides are transformed into cells, formation of homo- and heterodimers will occur. Conditions for expression can be adjusted so that heterodimer formation is favored over homodimer formation.

[0464] (a) Immunoglobulin Domain

[0465] Multimerization domains include those comprising a free thiol moiety capable of reacting to form an intermolecular disulfide bond with a multimerization domain of an additional amino acid sequence. For example, a multimerization domain can include a portion of an immunoglobulin molecule, such as from IgG1, IgG2, IgG3, IgG4, IgA, IgD, IgM, and IgE. Generally, such a portion is an immunoglobulin constant region (Fc). Preparations of fusion proteins fused to various portions of antibody-derived polypeptides (including the Fc domain) has been described, see e.g., Ashkenazi et al. (1991) PNAS 88: 10535; Byrn et al. (1990) Nature, 344:677; and Hollenbaugh and Aruffo, (1992) “Construction of Immnoglobulin Fusion Proteins,” in Current Protocols in Immunology, Suppl. 4, pp. 10.19.1-10.19.11.

[0466] Antibodies bind to specific antigens and contain two identical heavy chains and two identical light chains covalently linked by disulfide bonds. The heavy and light chains contain variable regions, which bind the antigen, and constant (C) regions. In each chain, one domain (V) has a variable amino acid sequence depending on the antibody specificity of the molecule. The other domain (C) has a rather constant sequence common among molecules of the same class. The domains are numbered in sequence from the amino-terminal end. For example, the IgG light chain is composed of two immunoglobulin domains linked from N- to C-terminus in the order V_{L}-C_{L}, referring to the light chain variable domain and the light chain constant domain, respectively. The IgG heavy chain is composed of four immunoglobulin domains linked from the N- to C-terminus in the order V_{H}-C_{H}1-C_{H}2-C_{H}3, referring to the variable heavy domain, contain heavy domain 1, constant heavy domain 2, and constant heavy domain 3. The resulting antibody molecule is a four chain molecule where each heavy chain is linked to a light chain by a disulfide bond, and the two heavy chains are linked to each other by disulfide bonds. Linkage of the heavy chains is mediated by a flexible region of the heavy chain, known as the hinge region. Fragments of antibody molecules can be generated, such as for example, by enzymatic cleavage. For example, upon protease cleavage by papain, a dimer of the heavy chain constant regions, the Fc domain, is cleaved from the two Fab regions (i.e. the portions containing the variable regions).

[0467] In humans, there are five antibody isotypes classified based on their heavy chains denoted as delta (δ), gamma (γ), mu (μ), and alpha (α) and epsilon (ε), giving rise to the IgD, IgG, IgM, IgA, and IgE classes of antibodies, respectively. The IgA and IgG classes contain the subclasses IgA1, IgA2, IgG1, IgG2, IgG3, and IgG4. Sequence differences between immunoglobulin heavy chains cause the various isotypes to differ in, for example, the number of C domains, the presence of a hinge region, and the number and location of interchain disulfide bonds. For example, IgM and IgE heavy chains contain an extra C domain (C4), that replaces the hinge region. The Fc regions of IgG, IgD, and IgA pair with each other through their Cγ3, Cδ3, and Cα3 domains, whereas the Fc regions of IgM and IgE dimerize through their Cμ4 and Cε4 domains. IgM and IgA form multimeric structures with ten and four antigen-binding sites, respectively.

[0468] Immunoglobulin chimeric polypeptides provided herein include a full-length immunoglobulin polypeptide. Alternatively, the immunoglobulin polypeptide is less than full length, i.e. containing a heavy chain, light chain, Fab, Fab2, Fv, or Fc. In one example, the immunoglobulin chimeric polypeptides are assembled as monomers or hetero- or homo-multimers, and particularly as dimer or tetramers. Chains or basic units of varying structures can be utilized to assemble the monomers and hetero- and homo-multimers. For example, an isoform polypeptide can be fused to all or part of an immunoglobulin molecule, including all or part of C_{H}, C_{L}, V_{H}, or V_{L} domain of an immunoglobulin molecule (see. e.g., U.S. Pat. No. 5,116,964). Chimeric isoform polypeptides can be readily produced and secreted by mammalian cells transformed with the appropriate nucleic acid molecule. The secreted forms include those where the isoform polypeptide is present in heavy chain dimers; light chain monomers or dimers; and heavy and light chain heterotetramers where the isoform polypeptide is fused to one or more light or heavy chains, including heterotetramers where up to and including all four variable regions analogues are substituted. In some examples, one or more than one nucleic acid fusion molecule can be transformed into host cells to produce a multimer where the isoforms portions of the multimer are the same or different. In some examples, a non-isoform polypeptide light-heavy chain variable-like domain is present, thereby producing a heterobifunctional antibody. In some examples, a chimeric polypeptide can be made fused to part of an immunoglobulin molecule lacking hinge disulfides, in which non-covalent or covalent interactions of the two polypeptides associate the molecule into a homo- or heterodimer.

[0469] (i) Fc Domain

[0470] Typically, the immunoglobulin portion of an immunoglobulin chimeric polypeptide fusion, such as fusion with an HGF isoform, includes the heavy chain of an immunoglobulin polypeptide, most usually the constant domains of the heavy chain. Exemplary sequences of heavy chain constant regions for human IgG sub-types are known. For example, for the exemplary heavy chain constant region set forth in SEQ ID NO:296, the CH1 domain corresponds to amino acids 1-98, the hinge region corresponds to amino acids 99-110, the CH2 domain corresponds to amino acids 111-223, and the CH3 domain corresponds to amino acids 224-330.

[0471] In one example, an immunoglobulin polypeptide chimeric protein can include the Fc region of an immunoglobulin polypeptide. Typically, such a fusion retains at least a functionally active hinge, CH2 and CH3 domains of the constant region of an immunoglobulin heavy chain. For example, a full-length Fc sequence of IgG1 includes amino acids 99-330 of the sequence set forth in SEQ ID NO:296. Numerous Fc domains are known, including variant Fc domains whose T-cell activity is reduced or eliminated. The precise site at which the linkage is made is not critical: particular sites are well known and can be selected in order to optimize the biological activity, secretion, or binding characteristics of the isoform polypeptide. An exemplary sequence of an Fc domain is set forth in SEQ ID NO:297 or SEQ ID NO:298.

[0472] In addition to hIgG1 Fc, other Fc regions also can be included in the isoform polypeptides provided herein. For example, where effector functions mediated by Fc/FcγR interactions are to be minimized, fusion with IgG isotypes that poorly recruit complement or effector cells, such as for example, the Fc of IgG2 or IgG4, is contemplated. Additionally, the Fc fusions can contain immunoglobulin sequences that are substantially encoded by immunoglobulin genes belonging to any of the antibody classes, including, but not limited to IgG (including human subclasses IgG1, IgG2, IgG3, or IgG4), IgA (including human subclasses IgA1 and IgA2), IgD, IgE, and IgM classes of antibodies. Further, linkers can be used to covalently link Fc to another polypeptide to generate an Fc chimera.

[0473] Modified Fc domains also are known (see e.g. U.S. Patent Publication No. US 2006/0024298; and International Patent Publication No. WO 2005/063816 for exemplary modifications). In some examples, the Fc region is such that it has altered (i.e. more or less) effector function than the effector function of an Fc region of a wild-type immunoglobulin heavy chain. The Fc regions of an antibody interacts with a number of Fc receptors, and ligands, imparting an array of important functional capabilities referred to as effector functions. Fc effector functions include, for example, Fc receptor binding, complement fixation, and T cell depleting activity (see e.g., U.S. Pat. No. 6,136,310). Methods of assaying T cell depleting activity, Fc effector function, and antibody stability are known in the art. For example, the Fc region of an IgG molecule interacts with the FcγRs. These receptors are expressed in a variety of immune cells, including for example, monocytes, macrophages, neutrophils, dendritic cells, eosinophils, mast cells, platelets, B cells, large granular lymphocytes, Langerhans' cells, natural killer (NK) cells, and γδ T cells. Formation of the Fc/FcγR complex recruits these effector cells to sites of bound antigen, typically resulting in signaling events within the cells and important subsequent immune responses such as release of inflammation mediators, B cell activation, endocytosis, phagocytosis, and cytotoxic attack. The ability to mediate cytotoxic and phagocytic effector functions is a potential mechanism by which antibodies destroy targeted cells. Recognition of and lysis of bound antibody on target cells by cytotoxic cells that express FcγRs is referred to as antibody dependent cell-mediated cytotoxicity (ADCC). Other Fc receptors for various antibody isotypes include FcεRs (IgE), FcαRs (IgA), and FcμRs (IgM).

[0474] Thus, a modified Fc domain can have altered affinity, including but not limited to, increased or low or no affinity for the Fc receptor. For example, the different IgG subclasses have different affinities for the FcγRs, with IgG1 and IgG3 typically binding substantially better to the receptors than IgG2 and IgG4. In addition, different FcγRs mediate different effector functions. FcγR1, FcγRIIa/c, and FcγRIIIa are positive regulators of immune complex triggered activation, characterized by having an intracellular domain that has an immunoreceptor tyrosine-based activation motif (ITAM). FcγIIb, however, has an immunoreceptor tyrosine-based inhibition motif (ITIM) and is therefore inhibitory. Thus, altering the affinity of an Fc region for a receptor can modulate the effector functions induced by the Fc domain.

[0475] In one example, an Fc region is used that is modified for optimized binding to certain FcγRs to better mediate effector functions, such as for example, ADCC. Such modified Fc regions can contain modifications corresponding to any one or more of G20S, G20A, S23D, S23E, S23N, S23Q, S23T, K30H, K30Y, D33Y, R39Y, E42Y, T44H, V48I, S51E, H52D, E56Y, E561, E56H, K58E, G65D, E67L, E67H, S82A, S82D, S88T, S108G, S1081, K110T, K110E, K110D, A111D, A114Y, A1114L, A1141, 1116D, 1116E, 1116N, 1116Q, E117Y, E117A, K118T, K118F, K118A, and P180L of the exemplary Fc sequence set forth in SEQ ID NO:297, or combinations thereof. A modified Fc containing these mutations can have enhanced binding to an FcR such as, for example, the activating receptor FcγIIIa and/or can have reduced binding to the inhibitory receptor FcγRIIb (see e.g., US 2006/0024298). Fc regions modified to have increased binding to FcRs can be more effective in facilitating the destruction of cancer cells in patients, even when linked with an isoform polypeptide. There are a number of possible mechanisms by which antibodies destroy tumor cells, including anti-proliferation via blockage of need growth pathways, intracellular signaling leading to apopotosis, enhanced down-regulation and/or turnover of receptors, ADCC, and via promotion of the adaptive immune response.

[0476] In another example, a variety of Fc mutants with substitutions to reduce or ablate binding with FcγRs also are known. Such muteins are useful in instances where there is a need for reduced or eliminated effector function mediated by Fc. This is often the case where antagonism, but not killing of the cells bearing a target antigen is desired. Exemplary of such an Fc is an Fc mutein described in U.S. Pat. No. 5,457,035. An exemplary Fc mutein is set forth in SEQ ID NO:299.

[0477] In an additional example, an Fc region can be utilized that is modified in its binding to FcRn, thereby improving the pharmacokinetics of an -Fc chimeric polypeptide. FcRn is the neonatal FcR, the binding of which recycles endocytosed antibody from the endosomes back to the bloodstream. This process, coupled with preclusion of kidney filtration due to the large size of the full length molecule, results in favorable antibody serum half-lives ranging from one to three weeks. Binding of Fc to FcRn also plays a role in antibody transport.

[0478] Typically, a polypeptide multimer is a dimer of two chimeric proteins created by linking, directly or indirectly, two of the same or different isoform polypeptide to an Fc polypeptide. In some examples, a gene fusion encoding an HGF isoform-Fc chimeric protein is inserted into an appropriate expression vector. The resulting Fc chimeric proteins can be expressed in host cells transformed with the recombinant expression vector, and allowed to assemble much like antibody molecules, where interchain disulfide bonds form between the Fc moieties to yield divalent polypeptides. Typically, a host cell and expression system is a mammalian expression system to allow for glycosylation for stabilizing the Fc proteins. Other host cells also can be used where glycosylation at this position is not a consideration.

[0479] The resulting chimeric polypeptides containing Fc moieties, and multimers formed therefrom, can be easily purified by affinity chromatography over Protein A or Protein G columns. Where two nucleic acids molecules encoding different chimeric polypeptides are transformed into cells, the formation of heterodimers must be biochemically achieved since chimeric molecules carrying the Fc-domain will be expressed as disulfide-linked homodimers as well. Thus, homodimers can be reduced under conditions that favor the disruption of inter-chain disulfides, but do no effect intra-chain disulfides. Typically, chimeric monomers with different extracellular portions are mixed in equimolar amounts and oxidized to form a mixture of homo- and heterodimers. The components of this mixture are separated by chromatographic techniques. Alternatively, the formation of this type of heterodimer can be biased by genetically engineering and expressing fusion molecules that contain a isoform polypeptide, followed by the Fc-domain of hIgG, followed by either c-jun or the c-fos leucine zippers (see below). Since the leucine zippers form predominantly heterodimers, they can be used to drive the formation of the heterodimers when desired. Chimeric polypeptides containing Fc regions also can be engineered to include a tag with metal chelates or other epitope. The tagged domain can be used for rapid purification by metal-chelate chromatography, and/or by antibodies, to allow for detection of western blots, immunoprecipitation, or activity depletion/blocking in bioassays.

[0480] (ii). Protuberances-Into-Cavity (i.e. Knobs and Holes)

[0481] Multimers can be engineered to contain an interface between a first chimeric polypeptide and a second chimeric polypeptide to facilitate hetero-oligomerization over homo-oligomerization. Typically, a multimerization domain of one or both of the first and second chimeric polypeptide is a modified antibody fragment such that the interface of the antibody molecule is modified to facilitate and/or promote heterodimerization. In some cases, the antibody molecule is a modified Fc region. Thus, modifications include introduction of a protuberance into a first Fc polypeptide and a cavity into a second Fc polypeptide such that the protuberance is positionable in the cavity to promote complexing of the first and second Fc-containing chimeric polypeptides.

[0482] Typically, stable interaction of a first chimeric polypeptide and a second chimeric polypeptide is via interface interactions of the same or different multimerization domain that contains a sufficient portion of a CH3 domain of an immunoglobulin constant domain. Various structural and functional data suggest that antibody heavy chain association is directed by the CH3 domain. For example, X-ray crystallography has demonstrated that the intermolecular association between human IgG1 heavy chains in the Fc region includes extensive protein/protein interaction between CH3 domain whereas the glycosylated CH2 domains interact via their carbohydrate (Deisenhofer et al. (1981) Biochem. 20: 2361). In addition, there are two inter-heavy chain disulfide bonds which are efficiently formed during antibody expression in mammalian cells unless the heavy chain is truncated to remove the CH2 and CH3 domains (King et al. (1992) Biochem. J. 281:317). Thus, heavy chain assembly appears to promote disulfide bond formation rather than vice versa. Engineering of the interface of the CH3 domain promotes formation of heteromultimers of different heavy chains and hinders the assembly of corresponding homomultimers (see e.g., U.S. Pat. No. 5,731,168; International Patent Application WO 98/50431 and WO 2005/063816; Ridgway et al. (1996) Protein Engineering, 9:617-621).

[0483] Thus, multimers provided herein can be formed between an interface of a first and second chimeric isoform polypeptide (the first and second polypeptides can be the same or different) where the multimerization domain of the first polypeptide contains at least a sufficient portion of a CH3 interface of an Fc domain that has been modified to contain a protuberance and the multimerization domain of the second polypeptide contains at least a sufficient portion of a CH3 interface of an Fc domain that has been modified to contain a cavity. All or a sufficient portion of a modified CH3 interface can be from an IgG, IgA, IgD, IgE, or IgM immunoglobulin. Interface residues targeted for modification in the CH3 domain of various immunoglobulin molecules are set forth in U.S. Pat. No. 5,731,168. Generally, the multimerization domain is all or a sufficient portion of a CH3 domain derived from an IgG antibody, such as for example, IgG1.

[0484] Amino acids targeted for replacement and/or modification to create protuberances or cavities in a polypeptide are typically interface amino acids that interact or contact with one or more amino acids in the interface of a second polypeptide. A first polypeptide that is modified to contain protuberance amino acids include replacement of a native or original amino acid with an amino acid that has at least one side chain which projects from the interface of the first polypeptide and is therefore positionable in a compensatory cavity in an adjacent interface of a second polypeptide. Most often, the replacement amino acid is one which has a larger side chain volume than the original amino acid residue. One of skill in the art can determine and/or assess the properties of amino acid residues to identify those that are ideal replacement amino acids to create a protuberance. Generally, the replacement residues for the formation of a protuberance are naturally occurring amino acid residues and include, for example, arginine (R), phenylalanine (F), tyrosine (Y), or tyrptophan (W). In some examples, the original residue identified for replacement is an amino acid residue that has a small side chain such as, for example, alanine, asparagines, aspartic acid, glycine, serine, threonine, or valine.

[0485] A second polypeptide that is modified to contain a cavity is one that includes replacement of a native or original amino acid with an amino acid that has at least one side chain that is recessed from the interface of the second polypeptide and thus is able to accommodate a corresponding protuberance from the interface of a first polypeptide. Often, the replacement amino acid is one which has a smaller side chain volume than the original amino acid residue. One of skill in the art can determine and/or assess the properties of amino acid residues to identify those that are ideal replacement residues for the formation of a cavity. Generally, the replacement residues for the formation of a cavity are naturally occurring amino acids and include, for example, alanine (A), serine (S), threonine (T) and valine (V). In some examples, the original amino acid identified for replacement is an amino acid that has a large side chain such as, for example, tyrosine, arginine, phenylalanine, or typtophan.

[0486] The CH3 interface of human IgG1, for example, involves sixteen residues on each domain located on four anti-parallel β-strands which buries 1090 A2 from each surface (see e.g., Deisenhofer et al. (1981) Biochemistry, 20:2361-2370; Miller et al., (1990) J. Mol. Biol., 216, 965-973; Ridgway et al., (1996) Prot. Engin., 9: 617-621; U.S. Pat. No. 5,731,168). Modifications of a CH3 domain to create protuberances or cavities are described, for example, in U.S. Pat. No. 5,731,168; International Patent Applications WO98/50431 and WO 2005/063816; and Ridgway et al., (1996) Prot. Engin., 9: 617-621. For example, modifications in a CH3 domain to create protuberances or cavities can be replacement of any amino acid corresponding to the interface amino acid Q230, V231, Y232, T233, L234, V246, S247, L248, T249, C250, L251, V252, K253, G254, F255, Y256, K275, T276, T277, P278, V279, L280, D281, G285, S286, F287, F288, L289, Y290, S291, K292, L293, T294, and V295 of the sequence set forth in SEQ ID NO:296. In some examples, modifications of a CH3 domain to create protuberances or cavities are typically targeted to residues located on the two central anti-parallel β-strands. The aim is to minimize the risk that the protuberances which are created can be accommodated by protruding into the surrounding solvent rather than being accommodated by a compensatory cavity in the partner CH3 domain. Exemplary of such modifications include, for example, replacement of any amino acid corresponding to the interface amino acid T249, L251, P278, F288, Y290, and K292. Exemplary of amino acid pairs for modification in a CH3 domain interface to create protuberances/cavity interactions include modification of T249 and Y290; and F288 and T277. For example, modifications can include T249Y and Y290T; T249W and Y290A; F288A and T277W; F288W and T277S; and Y290T and T249Y.

[0487] In some example, more than one interface interaction can be made. For example, modifications also include, for example, two or more modifications in a first polypeptide to create a protuberance and two or more medications in a second polypeptide to create a cavity. Exemplary of such modifications include, for example, modification of T249Y and F288A in a first polypeptide and modification of T277W and Y290T in a second polypeptide; modification of T277W and F288W in a first polypeptide and modification of T277S and Y290A in a second polypeptide; or modification of F288A and Y290A in a first polypeptide and T249W and T277S in a second polypeptide.

[0488] As with other multimerization domains described herein, including all or part of any immunoglobulin molecule or variant thereof, such as an Fc domain or variant thereof, an Fc variant containing CH3 protuberance/cavity modifications can be joined to an isoform polypeptide anywhere, but typically via its N- or C-terminus, to the N- or C-terminus of a first and/or second isoform polypeptide to form a chimeric polypeptide. The linkage can be direct or indirect via a linker. Also, the chimeric polypeptide can be a fusion protein or can be formed by chemical linkage, such as through covalent or non-covalent interactions. Typically, a knob and hole molecule is generated by co-expression of a first isoform polypeptide linked to an Fc variant containing CH3 protuberance modification(s) with a second isoform polypeptide linked to an Fc variant containing CH3 cavity modification(s).

[0489] (b). Leucine Zippers

[0490] Another method for preparing multimers involves use of a leucine zipper domain. Leucine zippers are peptides that promote multimerization of the proteins in which they are found. Typically, leucine zipper is a term used to refer to a repetitive heptad motif containing four to five leucine residues present as a conserved domain in several proteins. Leucine zippers fold as short, parallel coiled coils, and can be responsible for oligomerization of the proteins of which they form a domain. Leucine zippers were originally identified in several DNA-binding proteins (see e.g., Landschulz et al. (1988) Science 240:1759), and have since been found in a variety of proteins. Among the known leucine zippers are naturally occurring peptides and derivatives thereof that dimerize or trimerize. Recombinant chimeric proteins containing an isoform polypeptide linked, directly or indirectly, to a leucine zipper peptide can be expressed in suitable host cells, and the polypeptide multimer that forms can be recovered from the culture supernatant.

[0491] Leucine zipper domains fold as short, parallel coiled coils (O'Shea et al. (1991) Science, 254:539). The general architecture of the parallel coiled coil has been characterized, with a “knobs-into-holes” packing, first proposed by Crick in 1953 (Acta Crystallogr., 6:689). The dimer formed by a leucine zipper domain is stabilized by the heptad repeat, designated (abcdefg)n (see e.g., McLachlan and Stewart (1978) J. Mol. Biol. 98:293), in which residues a and d are generally hydrophobic residues, with d being a leucine, which lines up on the same face of a helix. Oppositely-charged residues commonly occur at positions g and e. Thus, in a parallel coiled coil formed from two helical leucine zipper domains, the “knobs” formed by the hydrophobic side chains of the first helix are packed into the “holes” formed between the side chains of the second helix.

[0492] The leucine residues at position d contribute large hydrophobic stabilization energies, and are important for dimer formation (Krystek et al. (1991) Int. J. Peptide Res. 38:229). Hydrophobic stabilization energy provides the main driving force for the formation of coiled coils from helical monomers. Electrostatic interactions also contribute to the stoichiometry and geometry of coiled coils.

[0493] (i). fos and jun

[0494] Two nuclear transforming proteins, fos and jun, exhibit leucine zipper domains, as does the gene product of the murine proto-oncogene, c-myc. The leucine zipper domain is necessary for biological activity (DNA binding) in these proteins. The products of the nuclear oncogenes fos and jun contain leucine zipper domains that preferentially form a heterodimer (O'Shea et al. (1989) Science, 245:646; Turner and Tijian (1989) Science, 243:1689). For example, the leucine zipper domains of the human transcription factors c-jun and c-fos have been shown to form stable heterodimers with a 1:1 stoichiometry (see e.g., Busch and Sassone-Corsi (1990) Trends Genetics, 6:36-40; Gentz et al., (1989) Science, 243:1695-1699). Although jun-jun homodimers also have been shown to form, they are about 1000-fold less stable than jun-fos heterodimers.

[0495] Thus, typically an isoform polypeptide multimer provided herein is generated using a jun-fos combination. Generally, the leucine zipper domain of either c-jun or c-fos is fused in frame at the C-terminus of an isoform of a polypeptide by genetically engineering fusion genes. Exemplary sequences of a c-jun or c-fos leucine zipper domain is set forth in SEQ ID NOS: 300 and 301, respectively. In some instances, a sequence of a leucine zipper can be modified, such as by the addition of a cysteine residue to allow formation of disulfide bonds, or the addition of a tyrosine residue at the C-terminus to facilitate measurement of peptide concentration. Exemplary sequences of a modified c-jun or c-fos leucine zipper domain are set forth in SEQ ID NOS: 302 and 303, respectively. In addition, the linkage of an isoform polypeptide with a leucine zipper can be direct or can employ a flexible linker domain, such as for example a hinge region of IgG, or other polypeptide linkers of small amino acids such as glycine, serine, threonine, or alanine at various lengths and combinations. In some instances, separation of a leucine zipper from the C-terminus of an encoded polypeptide can be effected by fusion with a sequence encoding a protease cleavage sites, such as for example, a thrombin cleavage site. Additionally, the chimeric proteins can be tagged, such as for example, by a 6XHis tag, to allow rapid purification by metal chelate chromatography and/or by epitopes to which antibodies are available, such as for example a myc tag, to allow for detection on western blots, immunoprecipitation, or activity depletion/blocking bioassays.

[0496] (ii). GCN4

[0497] A leucine zipper domain also occurs in a nuclear protein that functions as a transcriptional activator of a family of genes involved in the General Control of Nitrogen (GCN4) metabolism in S. cerevisiae. An exemplary sequence of the GCN4 leucine zipper domain is set forth in SEQ ID NO: 304. The protein is able to dimerize and bind promoter sequences containing the recognition sequence for GCN4, thereby activating transcription in times of nitrogen deprivation. Amino acid substitutions in the a and d residues of a synthetic peptide representing the GCN4 leucine zipper domain, change the oligomerization properties of the leucine zipper domain. For example, when all residues at position a are changed to isoleucine, the leucine zipper still forms a parallel dimer. When, in addition to this change, all leucine residues at position d also are changed to isoleucine, the resultant peptide spontaneously forms a trimeric parallel coiled coil in solution. Exemplary sequences of trimer and tetramer forms of a GCN4 leucine zipper domain are set forth in SEQ ID NOS: 305 and 306, respectively.

[0498] (c). Other Multimerization Domains

[0499] Other multimerization domains are known to those of skill in the art and are any that facilitate the protein-protein interaction of two or more polypeptides that are separately generated and expressed. Examples of other multimerization domains that can be used to provide protein-protein interactions between or among polypeptides include, but are not limited to, the bamase-barstar module (see e.g., Deyev et al., (2003) Nat. Biotechnol. 21:1486-1492); selection of particular protein domains (see e.g., Terskikh et al., (1997) PNAS 94: 1663-1668 and Muller et al., (1998) FEBS Lett. 422:259-264); selection of particular peptide motifs (see e.g., de Kruif et al., (1996) J. Biol. Chem. 271:7630-7634 and Muller et al., (1998) FEBS Lett. 432: 45-49); and the use of disulfide bridges for enhanced stability (de Kruif et al., (1996) J. Biol. Chem. 271:7630-7634 and Schmiedl et al., (2000) Protein Eng. 13:725-734). Exemplary of another type of multimerization domain is one where multimerization is facilitated by protein-protein interactions between different subunit polypeptides, such as is described below for PKA/AKAP interaction.

[0500] R/PKA-AD/AKAP

[0501] Multimeric polypeptides also can be generated utilizing protein-protein interactions between the regulatory (R) subunit of cAMP-dependent protein kinase (PKA) (see e.g., SEQ ID NO:307 or SEQ ID NO:309) and the anchoring domains (AD) of A kinase anchor proteins (AKAPs, see e.g., Rossi et al., (2006) PNAS 103:6841-6846) (see e.g., see e.g., SEQ ID NO:308 or SEQ ID NO:310). Two types of R subunits (RI and RII) are found in PKA, each with an α and β isoform. The R subunits exist as dimers, and for RII, the dimerization domain resides in the 44 amino-terminal residues. AKAPs, via the interaction of their AD domain, interact with the R subunit of PKA to regulate its activity. AKAPs bind only to dimeric R subunits. For example, for human RIIα, the AD binds to a hydrophobic surface formed from the 23 amino-terminal residues.

[0502] d. Methods of Generating and Cloning HGF Fusions

[0503] The methods by which DNA sequences may be obtained and linked to provide the DNA sequence encoding the fusion protein are well known in the field of recombinant DNA technology. DNA for a sequence to be fused to an HGF isoform including, but not limited to, a sequence of an HGF isoform, a precursor signal sequence, a fusion tag, another isoform or intron-encoded portion thereof, or any other desired sequence can be generated by various methods including: synthesis using an oligonucleotide synthesizer; isolation from a target DNA such as from an organism, cell, or vector containing the sequence by appropriate restriction enzyme digestion; or can be obtained from a target source by PCR of genomic DNA with the appropriate primers. In a PCR method, primers directed against a target sequence, such as an HGF isoform sequence, can be engineered that contain sequences for small epitope tags, such as a myc tag, His tag, or other small epitope tag, and/or any other additional DNA sequence such as a restriction enzyme linker sequence or a protease cleavage site sequence such that the entire PCR sequence is incorporated into a target nucleic acid sequence upon PCR amplification. In an exemplary embodiment, the primer can introduce restriction enzyme sites into an HGF isoform sequence, or other target sequence, to facilitate the cloning of the sequence into a vector.

[0504] In one example, HGF isoform fusion sequences can be generated by successive rounds of ligating DNA target sequences, amplified by PCR, into a vector at engineered recombination sites. For example, a nucleic acid sequence for an HGF isoform, fusion tag, homologous or heterologous precursor sequence, or other desired nucleic acid sequence can be PCR amplified using primers that hybridize to opposite strands and flank the region of interest in a target DNA. Cells or tissues or other sources known to express a target DNA molecule, or a vector containing a sequence for a target DNA molecule, can be used as a starting product for PCR amplification events. The PCR amplified product can be subcloned into a vector for further recombinant manipulation of a sequence, such as to create a fusion with another nucleic acid sequence already contained within a vector, or for the expression of a target molecule.

[0505] PCR primers used in the PCR amplification also can be engineered to facilitate the operative linkage of nucleic acid sequences. For example, non-template complementary 5′ extension can be added to primers to allow for a variety of post-amplification manipulations of the PCR product without significant effect on the amplification itself. For example, these 5′ extensions can include restriction sites, promoter sequences, sequences for epitope tags, etc. In one example, for the purpose of creating a fusion sequence, sequences that can be incorporated into a primer include, for example, a sequence encoding a myc epitope tag or other small epitope tag, such that the amplified PCR product effectively contains a fusion of a nucleic acid sequence of interest with an epitope tag.

[0506] In another example, incorporation of restriction enzyme sites into a primer can facilitate subcloning of the amplification product into a vector that contains a compatible restriction site, such as by providing sticky ends for ligation of a nucleic acid sequence. Subcloning of multiple PCR amplified products into a single vector can be used as a strategy to operatively link or fuse different nucleic acid sequences. Examples of restriction enzyme sites that can be incorporated into a primer sequence can include, but are not limited to, an Xho I restriction site, an Nhe I restriction site, a Not I restriction site, an EcoR I restriction site, or an Xba I restriction site. Other methods for subcloning of PCR products into vectors include blunt end cloning, TA cloning, ligation independent cloning, and in vivo cloning.

[0507] The creation of an effective restriction enzyme site into a primer facilitates the digestion of the PCR fragment with a compatible restriction enzyme to expose sticky ends, or for some restriction enzyme sites, blunt ends, for subsequent subcloning. There are several factors to consider in engineering a restriction enzyme site into a primer so that it retains its compatibility for a restriction enzyme. First, the addition of 2-6 extra bases upstream of an engineered restriction site in a PCR primer can greatly increase the efficiency of digestion of the amplification product. Other methods that can be used to improve digestion of a restriction enzyme site by a restriction enzyme include proteinase K treatment to remove any thermostable polymerase that can block the DNA, end-polishing with Klenow or T4 DNA polymerase, and/or the addition of spermidine. An alternative method for improving digestion efficiency of PCR products also can include concatamerization of the fragments after amplification. This is achieved by first treating the cleaned up PCR product with T4 polynucleotide kinase (if the primers have not already been phosphorylated). The ends may already be blunt if a proofreading thermostable polymerase such as Pfu was used or the amplified PCR product can be treated with T4 DNA polymerase to polish the ends if a non-proofreading enzyme such as Taq is used. The PCR products can be ligated with T4 DNA ligase. This effectively moves the restriction enzyme site away from the end of the fragments and allows for efficient digestion.

[0508] Prior to subcloning of a PCR product containing exposed restriction enzyme sites into a vector, such as for creating a fusion with a sequence of interest, it is sometimes necessary to resolve a digested PCR product from those that remain uncut. In such examples, the addition of fluorescent tags at the 5′ end of a primer can be added prior to the PCR. This allows for identification of digested products since those that have been digested successfully will have lost the fluorescent label upon digestion.

[0509] In some instances, the use of amplified PCR products containing restriction sites for subsequent subcloning into a vector for the generation of a fusion sequence can result in the incorporation of restriction enzyme linker sequences in the fusion protein product. Generally such linker sequences are short and do not impair the function of a polypeptide so long as the sequences are operatively linked.

[0510] The nucleic acid molecule encoding an isoform fusion protein can be provided in the form of a vector which comprises the nucleic acid molecule. One example of such a vector is a plasmid. Many expression vectors are available and known to those of skill in the art and can be used for expression of an HGF isoform, including isoform fusions. The choice of expression vector can be influenced by the choice of host expression system. In general, expression vectors can include transcriptional promoters and optionally enhancers, translational signals, and transcriptional and translational termination signals. Expression vectors that are used for stable transformation typically have a selectable marker which allows selection and maintenance of the transformed cells. In some cases, an origin of replication can be used to amplify the copy number of the vector.

[0511] 2. Targeting Agent/Targeting Agent Conjugates

[0512] HGF polypeptide isoforms also can be provided as conjugates between the isoform and another agent. The conjugate can be used to target to a receptor with which the isoform interacts and/or to another targeted receptor for delivery of the isoform. Such conjugates include linkage of an HGF isoform to a targeted agent and/or targeting agent. Conjugates can be produced by any suitable method including by expression of fusion proteins in which, for example, DNA encoding a targeted agent or targeting agent, with or without a linker region, is operatively linked to DNA encoding an HGF isoform. Protein conjugates also can be produced by chemical coupling of an HGF isoform polypeptide, typically through disulfide bonds between cysteine residues present in or added to the components, or through amide bonds or other suitable bonds, such as by using heterobifunctional cross-linking reagents such as those provided herein or known in the art. Ionic or other linkages also are contemplated.

[0513] Conjugates can contain one or more HGF isoforms linked, either directly or via a linker, to one or more targeted agents: (HGF isoform)n, (L)q, and (targeted agent)m in which at least one HGF isoform is linked directly or via one or more linkers (L) to at least one targeted agent. Such conjugates also can be produced with any portion of an HGF isoform sufficient to bind to a target, such as a target cell type for treatment. Any suitable association among the elements of the conjugate and any number of elements where n, and m are integers greater than 1 and q is zero or any integer greater than 1, is contemplated as long as the resulting conjugates interact with a targeted cell surface receptor, such as MET, or to a targeted cell type.

[0514] Examples of a targeted agent include drugs and other cytotoxic molecules such as toxins that act at or via the cell surface and those that act intracellularly. Examples of such moieties include radionuclides, radioactive atoms that decay to deliver, e.g., ionizing alpha particles or beta particles, or X-rays or gamma rays, that can be targeted when coupled to an HGF isoform. Other examples include chemotherapeutics that can be targeted by coupling with an isoform. For example, geldanamycin targets proteosomes. An isoform-geldanamycin molecule can be directed to intracellular proteosomes, degrading the targeted isoform and liberating geldanamycin at the proteosome. Other toxic molecules include toxins, such as ricin, saporin and natural products from conches or other members of phylum mollusca. Another example of a conjugate with a targeted agent is an HGF isoform coupled, for example as a protein fusion, with an antibody or antibody fragment. For example, an isoform can be coupled to an Fc fragment of an antibody that binds to a specific cell surface marker to induce killer T cell activity in neutrophils, natural killer cells, and macrophages. A variety of toxins are well known to those of skill in the art.

[0515] Conjugates also can contain one or more HGF isoforms linked, either directly or via a linker, to one or more targeting agents: (HGF isoform)n, (L)q, and (targeting agent)m in which at least one HGF isoform is linked directly or via one or more linkers (L) to at least one targeting agent. Any suitable association among the elements of the conjugate and any number of elements where n, and m are integers greater than 1 and q is zero or any integer greater than 1, is contemplated as long as the resulting conjugates interacts with a target, such as a targeted cell type.

[0516] Targeting agents include any molecule that targets an HGF isoform to a target such as a particular tissue or cell type or organ. Examples of targeting agents include cell surface antigens, cell surface receptors, proteins, lipids and carbohydrate moieties on the cell surface or within the cell membrane, molecules processed on the cell surface or secreted, and other extracellular molecules. Molecules useful as targeting agents include, but are not limited to, an organic compound; inorganic compound; metal complex; receptor; enzyme; antibody; protein; nucleic acid; peptide nucleic acid; DNA; RNA; polynucleotide; oligonucleotide; oligosaccharide; lipid; lipoprotein; amino acid; peptide; polypeptide; peptidomimetic; carbohydrate; cofactor; drug; prodrug; lectin; sugar; glycoprotein; biomolecule; macromolecule; biopolymer; polymer; and other such biological materials. Exemplary molecules useful as targeting agents include ligands for receptors, such as proteinaceous and small molecule ligands, and antibodies and binding proteins, such as antigen-binding proteins.

[0517] Alternatively, the HGF isoform, which specifically interacts with a particular receptor, receptors, or other molecule, is the targeting agent and is linked to targeted agent, such as a toxin, drug or nucleic acid molecule. The nucleic acid molecule can be transcribed and/or translated in the targeted cell or it can be a regulatory nucleic acid molecule.

[0518] The HGF isoform can be linked directly to the targeted agent (or targeting agent) or via a linker. Linkers include peptide and non-peptide linkers and can be selected for functionality, such as to relieve or decrease steric hindrance caused by proximity of a targeted agent or targeting agent to an HGF isoform and/or increase or alter other properties of the conjugate, such as the specificity, toxicity, solubility, serum stability and/or intracellular availability and/or to increase the flexibility of the linkage between an HGF isoform and a targeted agent or targeting agent. Linkage can also be by chemical cross-linking such as by using a heterobifunctional cross-linker as described herein. Examples of linkers and conjugation methods are known in the art (see, for example, WO 00/04926). HGF isoforms also can be targeted using liposomes and other such moieties that direct delivery of encapsulated or entrapped molecules.

[0519] 3. Peptidomimetic Isoforms

[0520] Also provided are “peptidomimetic” isoforms in which one or more bonds in the peptide backbone (or other bond(s)) is (are) replaced by a bioisostere or other bond such that the resulting polypeptide peptidomimetic has improved properties, such as resistance to proteases, compared to the unmodified form.

### H. Methods for Altering Serum Half-Life and Other Therapeutic Properties

[0521] Methods are provided herein for increasing the serum half-life, stability, solubility and/or reducing immunogenicity of a polypeptide. Increasing the carbohydrate content of a protein can affect these properties. Methods for increasing the carbohydrate content include the introduction of one or more consensus sites for glycosylation into the target protein. Carbohydrate content also can be increased by altering the pattern, or spacing, of existing glycosylation sites within a target protein. Introduction of consensus glycosylation sites or alteration of consensus glycosylation sites can be accomplished by amino acid substitution or by addition of a polypeptide sequence containing consensus sites for glycosylation. A polypeptide sequence containing consensus sites for glycosylation can be fused to either the amino- or carboxy-terminus of the target protein, or alternatively, can be engineered to occur within the target protein to thereby increase its carbohydrate content.

[0522] Provided herein are methods for increasing carbohydrate content of a polypeptide and polypeptide products that have increased carbohydrate content. In particular, fusion proteins containing all or a portion of a CD45 protein are provided. The portion of CD45 is selected to include one or more, generally two, three, four or more glycosylation sites. This portion is fused to a protein, at the N-terminus, C-terminus or internally. The site for insertion is selected so that the protein retains an activity, particularly a therapeutic activity. Insertion of the CD45 fragment should not substantially alter such activity and is selected so that at least, 1%, 2%, 5%, 10%, 20%, 30%, 40%, 50%, 60%, 70%, 80%, 90%, 95%, 96%, 97%, 98%, 99% or more of the activity is retained. The particular amount of activity retained is dependent upon the protein whose carbohydrate content is being increased and its intended use. If necessary, the amount can be empirically determined. Some proteins, such as proteases, are so active that retention of only 1% of the activity is still sufficient for many purposes. Other proteins may only tolerate a 10% loss of activity before their purpose is compromised. Assays to assess activity are available for most, if not all therapeutic proteins and other active proteins, or can be developed.

[0523] 1. N-Linked and O-Linked Glycosylation

[0524] Proteins can be modified in any way that increases glycosylation. For example, they can be modified by adding N-linked or O-linked glycosylation sites. O-linked glycosylation occurs by addition of a monosaccharide, such as N-acetylgalactosamine (GalNac), to the hydroxyl group of a Ser or Thr residue in the target protein. In collagens, galactose is added to the hydroxyl group of hydroxylysine. Glycosyltransferases subsequently attach additional carbohydrate moieties to the modified residue to form a mature O-glycan. O-linked oligosaccharides typically contain one to four sugar residues. O-linked glycosylation occurs at sites defined by protein secondary structures, such as an extended beta turn. N-linked glycosylation occurs by addition of a 14-residue oligosaccharide, N-acetylglucosamine (GlcNAc), to the amide nitrogen of an Asn residue with a consensus motif, Asn-X-Ser/Thr, where X is any amino acid with the exception of Pro. Glycosyltransferases subsequently alter the attached oligosaccharide to form a mature N-glycan. N-linked oligosaccharides contain mannose, N-acetylglucosamine and typically have several branches of carbohydrates, each terminating with a negatively charged sialic acid residue. Protein secondary structure can affect the availability of consensus sites as targets for glycosylation.

[0525] Glycosylation reactions occur within the lumina of cell organelles involved in the secretory pathway, including the endoplasmic reticulum (ER) and the cis-, medial-, and trans-Golgi cisternae. Signal sequences can target the nascent polypeptides to the ER. Signal sequences can be present in the wild-type protein or can be engineered through recombinant DNA techniques by fusion of a nucleotide sequence encoding the signal peptide to the nucleotide sequence encoding the target protein.

[0526] 2. Effects of Glycosylation

[0527] Glycosylation can increase serum-half-life of polypeptides by increasing the stability and solubility, and reducing the immunogenicity of a protein. Glycosylation can increase the stability of proteins by reducing the proteolysis of the protein. Glycosylation can protect the protein from thermal degradation, exposure to denaturing agents, damage by oxygen free radicals, and changes in pH. Glycosylation also can allow the target protein to evade clearance mechanisms that can involve binding to other proteins, including cell surface receptors. Carbohydrate moieties that contain sialic acid can affect the solubility of a protein. The sialic acid moieties are highly hydrophilic and can shield hydrophobic residues of the target protein. This decreases aggregation and precipitation of the target protein. Decreased aggregation also aids in the prevention of the immune response against the target protein. Carbohydrates can furthermore shield immunogenic sequences from the immune system. The volume of space occupied by the carbohydrate moieties can decrease the available surface area that is surveyed by the immune system. These properties lead to the reduction in immunogenicity of the target protein.

[0528] 3. Therapeutic Uses for Glycosylation

[0529] Increasing the serum half-life of proteins can improve their potential for use as therapeutics. Rapid clearance of therapeutic proteins by the body decreases the efficacy of treatments and increases the number of injections needed by the patient. Increasing the serum half-life through methods, such as enhancing the glycosylation of the therapeutic protein, can ameliorate the need for frequent injections. Other effects of glycosylation, such as solubility and decreased immunogenicity of the target protein, are desirable characteristics for therapeutic proteins. Increased solubility can increase the options for suitable compositions for delivery of the therapeutic protein and can enhance the ability of the therapeutic protein to reach the target tissue once inside the body. Decreasing the immunogenicity of the protein can decrease likelihood adverse immune reactions.

[0530] Examples of therapeutic proteins that can be engineered to increase their glycosylation include, but are not limited to, growth factors, antibodies, cytokines, such as tumor necrosis factors and interleukins, and cytotoxic agents and other agents disclosed herein and known to those of skill in the art. Such agents include, but are not limited to, tumor necrosis factor, α-interferon, β-interferon, nerve growth factor, platelet derived growth factor, tissue plasminogen activator; or biological response modifiers such as, for example, lymphokines, interleukin-I (IL-1), interleukin-2 (IL-2), interleukin-6 (IL-6), granulocyte macrophage colony stimulating factor (GM-CSF), granulocyte colony stimulating factor (G-CSF), erythropoietin (EPO), pro-coagulants such as tissue factor and tissue factor variants, pro-apoptotic agents such FAS-ligand, fibroblast growth factors (FGF), nerve growth factor and other growth factors.

[0531] 4. Use of CD45 for Altering Serum Half-Life

[0532] CD45 is a transmembrane protein tyrosine phosphatase that contains an extracellular domain that is heavily glycosylated, a single transmembrane domain, and an intracellular domain containing tandemly duplicated phosphatase domains. Fusions of a target protein to the extracellular domain of CD45, or fragments thereof, can be engineered to alter, particularly increase, the serum half-life of the target protein by increasing the overall carbohydrate content of the recombinant protein. Methods are provided herein for the use of CD45 extracellular domain, or fragments thereof, for the production of CD45 fusion proteins.

[0533] An exemplary full-length CD45 polypeptide is provided herein as SEQ ID NO: 272 encoded by the nucleic acid sequence set forth as SEQ ID NO: 271. An allelic variant of CD45 can contain one or more nucleotide changes compared to SEQ ID NO: 271 or one or more amino acid changes compared to SEQ ID NO: 272. Allelic variation can occur in any one or more of the exon or intron sequences of a CD45 gene. Nucleic acids encoding CD45 proteins and the encoded CD45 polypeptides can include allelic variants of CD45. An exemplary CD45 allelic variant can include any one or more nucleotide changes as set forth in SEQ ID NO: 273 or any one or more amino acid changes as set forth in SEQ ID NO: 274. Furthermore, where CD45 is added to increase carbohydrate content, variation and modifications can be introduced that do affect the glycoslyation sites and/or that add additional glycosylation sites. Hence variants of the CD45 polypeptide disclosed herein and those known to those of skill in the art can be employed. Such variants can have 40%, 50%, 60%, 70%, 80%, 90%, 95%, 96%, 97%, 98%, 99% identity to the CD45 polypeptides disclosed herein or to allelic and species variants thereof.

[0534] a. CD45 Function

[0535] CD45 is expressed on all nucleated cells of hematopoietic origin and functions in lymphocyte receptor activation and development. The intracellular phosphatase domain of CD45 modulates the activity of Src family protein tyrosine kinases, such as Lck and Fyn, by removal of an inhibitory phosphate on the peptide activation loop that inhibits the kinase activity by blocking substrate binding. Activation of these kinases contributes to T cell activation, T cell development, and B cell development via B cell receptor (BCR) activation.

[0536] b. CD45 Dimerization And Glycosylation

[0537] The activity of CD45 can be controlled by dimerization of the receptor. Dimerization of the extracellular region can lead to inactivation of the intracellular phosphatase activity. The inhibition occurs through reciprocal interaction of an inhibitory structure of one CD45 protein with the phosphatase domain of another CD45 protein. The CD45 dimer represents the inactive form of the receptor, whereas monomeric forms of CD45 represent an active, or “primed”, state of the receptor, where the active phosphatase is poised to respond to lymphocyte activation. Differences in receptor dimerization can be achieved through changes in the carbohydrate content of the CD45 extracellular region. Increased glycosylation causes an increase in the monomeric form of CD45, leading to increased phosphatase activity. Glycosylation of the extracellular region also promotes the binding of lectins, such as CD22 and galectin-1, to the cell surface, though these proteins bind generally to T-cell glycoproteins and do not appear to be involved in signaling through CD45 phosphatase domain.

[0538] Changes in glycosylation of CD45 can be achieved through alternative splicing of exons encoding glycosylated domains of the receptor. Exons 4, 5, and 6 (named A, B, and C domains, respectively) encode a polypeptide region near the N-terminus of the protein that is heavily O-glycosylated with variable sialic acid modification. Alternative splicing of the 4, 5, and 6 exons produces different isoforms of CD45. The extracellular regions of the isoforms vary in size, shape, and charge in large part due to differences in carbohydrate content. The CD45 isoform RO that lacks all three domains is approximately 180 kDa in size whereas the CD45 isoform RABC that includes the A, B, and C, domains is approximately 220-240 kDa. The RO and RABC isoforms of CD45 are expressed differentially depending on the cell type, developmental stage, and cell activation state. For example, activated T cells express high levels of the RABC isoform on the first day of stimulation and then gradually switches expression to the RO isoform as activation decreases. For another example, naïve T cells, which are primed for activation, express high levels of the RABC isoform whereas memory T cells, which have lower tyrosine kinase activation, express the RO isoform. Other alternatively spliced CD45 variants encode isoforms that include different combinations of the A, B, and C domains. For example, a 210 kDa isoform contains either A and B or B and C domains and a 200 kDa isoform contains the B domain.

[0539] The remainder of the extracellular domain also is heavily glycosylated. This region contains a cysteine rich domain (d1) followed by three fibronectin type III repeat domains (d2, d3, and d4). Glycosylation in this region is predominantly N-linked glycosylation. The N-linked conjugates are tetra- and triantennary complex-type carbohydrate chains that contain poly(N-acetyllactosamine) groups and α-2,6 sialic acid residues. The N-linked glycosylation of these domains contributes to binding of CD22 of B cells, serum mannan-binding protein, and the glucosidase II lectin found in the endoplasmic reticulum. Binding of these proteins to CD45 can contribute to cell adhesion, thymocyte maturation, and alteration of carbohydrate content, respectively.

TABLE 5
CD45 Extracellular Region-Domains
and Potential Glycosylation Sites

| NT | AA | CD45 | Domain | Potential |
|---|---|---|---|---|
| SEQ | SEQ | Extracellular | Location | Glycosylation |
| ID | ID | Domains | (human CD45) | Sites |
| 280 | 281 | Extracellular | 32-575 | (see below, and N197) |
| | | Domain | | |
| 282 | 283 | A | 32-97 | O-linked: various |
| 284 | 285 | B | 98-144 | undefined S/T residues |
| 286 | 287 | C | 145-192 | in domain |
| | | | | N-linked: N78, N90, |
| | | | | N95, N184, N190 |
| 288 | 289 | d1 - Cysteine | 218-299 | N-linked: N232, N260, |
| | | rich | | N270, N276 |
| 290 | 291 | d2 - Fibronectin | 300-388 | N-linked: N335, N378 |
| | | type III | | |
| 292 | 293 | d3 - Fibronectin | 389-481 | N-linked: N419, N468 |
| | | type III | | |
| 294 | 295 | d4 - Fibronectin | 482-572 | N-linked: N488, N529 |
| | | type III | | |

[0540] c. CD45 Fusion Proteins

[0541] CD45 fusion proteins contain a polypeptide and a CD45 protein fragment and combinations of fragments thereof. The CD45 fragment is derived from the extracellular region of CD45 as outlined in the Table 5 above and set forth in SEQ ID NOS:281, 283, 285, 287, 289, 291, 293, 295, and variants thereof. Provided herein are CD45 fusion proteins that contain a cell surface receptor (CSR) isoform and a CD45 protein fragment derived from the extracellular region of CD45, and combinations of fragments thereof. In a further embodiment, a CD45 fusion protein contains, a CSR isoform and a CD45 protein fragment, or combinations of fragments thereof, containing one or more glycosylation sites. Exemplary CD45 protein fragments include, but are not limited to, peptides set forth in SEQ ID NOS: 281, 283, 285, 287, 289; 291, 293, 295, and variants thereof, including allelic and species variants, and any having at least or at least about 50%, 60%, 70%, 80%, 90%, 95%, 96%, 97%, 98%, 99% or more sequence identity to these CD45 proteins. Exemplary CD45 protein fragments are encoded by nucleic acid molecules that contain the sequence of nucleotides set forth in SEQ ID NOS: 280, 282, 284, 286, 288, 290, 292, 294, and variants, including species and allelic variants, thereof. Exemplary CSR isoforms include, but are not limited to, peptides and nucleic acid molecules that encode the polypeptides set forth in SEQ ID NOS: 36-245 and variants thereof. In a further embodiment, nucleic acid molecules encoding a CD45 fusion protein contains a CSR isoform and a CD45 protein, or fragments thereof, and are provided herein. Variants of peptide sequences set forth in SEQ ID NOS: 281, 283, 285, 287, 289, 291, 293, and 295 and nucleic acid sequences set forth in SEQ ID NOS: 280, 282, 284, 286, 288, 290, 292, and 294 are provided as set forth in SEQ ID NOS: 273 and 274 respectively.

[0542] Provided herein are CD45 fusion proteins containing a ligand isoform and a CD45 protein, or fragment thereof. Provided herein are CD45 fusion proteins containing a ligand isoform and a CD45 protein fragment, or combinations of fragments thereof, derived from the extracellular region of CD45. In a further embodiment, a CD45 fusion protein containing a ligand isoform and a CD45 protein fragment, or combinations of fragments thereof, containing one or more putative glycosylation sites. Exemplary protein fragments include, but are not limited to peptides set forth in SEQ ID NOS: 281, 283, 285, 287, 289, 291, 293, 295, and variants thereof. Exemplary CD45 protein fragments are encoded by nucleic acids set forth in SEQ ID NOS: 280, 282, 284, 286, 288, 290, 292, 294, and variants thereof. Exemplary ligand isoforms include, but are not limited to peptides and the nucleic acid molecules that encode the polypeptides set forth in SEQ ID NOS: 10-14, 18, 20, or variants thereof. In a further embodiment, nucleic acid molecules encoding a CD45 fusion protein contains a ligand isoform and a CD45 protein, or fragments thereof, and are provided herein.

[0543] CD45 fusion proteins can contain combinations of entire CD45 protein fragments, or portions thereof, of peptides set forth in SEQ ID NOS: 280-295 and variants thereof. Allelic variants of CD45 also include species variants. CD45 is present in multiple species besides human such as, but not limited to, other mammals, birds, fish, reptiles, amphibians and insects. Exemplary sequences for species variants of CD45 include, but are not limited to, chimpanzee, mouse, rat, dog, and chicken, which are set forth in SEQ ID NOS: 275-279.

[0544] In other embodiments, a CD45 fusion protein contains a biologically active and/or therapeutically active variant of a CSR isoform, and a CD45 protein, or fragments thereof. In other embodiments, a CD45 fusion protein contains a biologically active and/or therapeutically active variant of a ligand isoform, and a CD45 protein, or fragments thereof.

[0545] Vectors containing the nucleic acid molecules encoding CD45-CSR isoform or CD45-ligand isoform fusion proteins are provided as are cells containing the vectors or nucleic acid molecules. Among the nucleic acid molecules provided are those that contain an intron and an exon, where the intron contains a stop codon; the nucleic acid molecule encodes an open reading frame that spans an exon intron junction; and the open reading frame terminates at the stop codon in the intron. The intron can encode one or more amino acids of the encoded polypeptide or the codon can be a first codon (and possibly the only codon) in the intron.

[0546] A non-exhaustive list of protein isoforms that can be fused to CD45, or fragments thereof, includes but is not limited to, CSR isoforms and ligand isoforms containing polypeptides and the nucleic acids encoding the polypeptides set forth in SEQ ID NOS: 10-14, 18, 20 and 36-245, including fragments and variants thereof.

[0547] d. Conjugates of CD45 Fusion Proteins

[0548] Nucleic acid molecules that can be joined to an CD45 fusion protein include, but are not limited to, for example, promoter sequences designed to facilitate intracellular protein expression, secretion sequences designed to facilitate protein secretion, regulatory sequences for regulating transcription and translation, molecules that regulate the serum stability of an encoded polypeptide such as an Fc portion of an immunoglobulin, and other polypeptide-encoding nucleic acid molecules such as those encoding a targeted agent or targeting agent, or those encoding all or part of another ligand or cell surface receptor intron fusion protein. The fusion sequence can be a component of an expression vector, or it can be part of a nucleic acid sequence that is inserted into an expression vector. In one embodiment, the CD45 fusion proteins can contain peptide sequence tags employed for detection and/or isolation of the fusion proteins by techniques known in the art, such as by western blotting, fluorescence microscopy, immunohistochemistry, immunoprecipitation, and column purification. Exemplary sequence tags include, but are not limited to a myc tag, Poly-His tag, GST tag, Flag tag, fluorescent or luminescent moiety such as GFP or luciferase, or any other epitope or fusion tag known to one of skill in the art. In another embodiment, the CD45 fusion proteins additionally contain signal sequence peptides employed to enable and/or to enhance secretion of the fusion protein. Exemplary signal sequence peptides include, but are not limited to, tPA pre/pro signal sequences as disclosed herein (see, e.g., SEQ ID NOS: 256-265). Additional conjugates, such as targeting agent conjugates, crosslinking agents, polypeptide linkers and fusions to all or part of another polypeptide, as described in Section G, can be applied to CD45 fusion proteins.

[0549] e. Therapeutic CD45 Fusion Proteins

[0550] CD45-CSR fusion proteins and/or CD45-ligand fusion proteins can be used to treat diseases that include inflammatory diseases, immune diseases, cancers, and other diseases that manifest aberrant angiogenesis or neovascularization or cell proliferation. Cancers include breast, lung, colon, gastric cancers, pancreatic cancers, and others. Inflammatory diseases include, for example, diabetic retinopathies and/or neuropathies and other inflammatory vascular complications of diabetes, autoimmune diseases, including autoimmune diabetes, atherosclerosis, Crohn's disease, diabetic kidney disease, cystic fibrosis, endometriosis, diabetes-induced vascular injury, inflammatory bowel disease, Alzheimer's disease and other neurodegenerative diseases, and other diseases known to those of skill in the art that involve proliferative response, immune responses and inflammatory responses and others in which CSRs are implicated, involved or in which they participate.

[0551] f. Methods for Measuring Glycosylation

[0552] Method for assessing the extent and pattern of glycosylation are provided herein. Modification of amino acid residues can be assessed by methods known by one of skill in art and can include techniques such as tryptic mapping, high liquid phase chromatography (HPLC), anion-exchange chromatography, circular dichromism, fluorophore labeling, mass spectrometry, crystallography, gel electrophoresis and enzymatic analysis of oligosaccharide release from PVDF membranes. Western blotting using panels of lectins that exhibit varying specificities and are conjugated with biotin or digoxigenin can identify a wide range of defined sugar epitopes found on glycoproteins. Western blotting also can be used to measure glycosylation of the CD45 extracellular domain specifically. Antibodies are available that detect extracellular domain of CD45 and can distinguish glycosylated variants of CD45.

[0553] g. Methods of Production and Increasing Glycosylation

[0554] Methods for the production of CD45 fusion proteins are provided herein. Mammalian expression systems as described in Section F3d can be used to express CD45 fusion proteins. Chinese hamster ovary (CHO) cell systems are often chosen for the production of glycoproteins since this cell type exhibits high expression of recombinant proteins and is capable of glycosylation of the proteins. Engineered human cell lines are also available, such as the GlycoExpress™ cell line (Glycotope), that are capable of producing glycoproteins with glycosylation patterns similar to endogenous wild-type human proteins. Engineered human cell lines are preferred for the production of therapeutic proteins as they possess the ability to properly sialylate glycosylated proteins, which affects the serum half-life and immunogenicity of a therapeutic glycoprotein.

[0555] h. HGF-CD45 Fusion Proteins and Therapeutic Uses

[0556] HGF isoforms can be fused to CD45, or a fragment thereof, to form a CD45-HGF fusion protein. HGF isoforms can be fused to a CD45 protein fragment, or combinations of fragments thereof, derived from the extracellular domain of CD45. Exemplary CD45 protein fragments include, but are not limited to, peptides set forth in SEQ ID NOS: 281, 283, 285, 287, 289, 291, 293, 295, and variants thereof. Exemplary CD45 protein fragments are encoded by nucleic acids set forth in SEQ ID NOS: 280, 282, 284, 286, 288, 290, 292, 294, and variants thereof. Exemplary HGF isoforms and allelic variants thereof that can be fused to a CD45 fragment include, but are not limited to, SEQ ID NOS: 10, 12 14, 18, and 20 Additional HGF polypeptides that can be fused to a CD45 fragment include, but are not limited to, polypeptides set forth in SEQ ID NOS: 3, 22, 24, 26, 28, 30, 32 and 246-251.

[0557] The CD45-HGF fusion protein can suppress, or alternatively, enhance HGF activity, such as angiogenesis, cell growth, morphogenesis, motogenesis, or tumor metastasis.

[0558] CD45-HGF fusion proteins can be used to treat, prevent, or ameliorate diseases that involve aberrant angiogenesis. CD45-HGF fusion proteins can be used to treat angiogeneic-related diseases, including but not limited to, rheumatoid arthritis, osteoarthritis, psoriasis, Osler-Webber syndrome, endometriosis, Still's disease, angiogenesis of the heart-muscle, peripheral hemangiectasis, hemophilic arthritis, age-related macular degeneration, retinopathy of prematurity, rejection to keratoplasty, systemic lupus erythematosus, atherosclerosis, neovascular glaucoma, choroidal neovascularization, retrolental fibroplasias, perosis, neurofibroma, hemangioma, acoustic neuroma, neurofibroma, trachoma, suppurative granuloma, and diabetes-related diseases, such as proliferative diabetic retinopathy and vascular diseases.

[0559] CD45-HGF fusion proteins can be used in the treatment and prevention of metastasis in cancers including, but not limited to, squamous cell cancer (e.g. epithelial squamous cell cancer), lung cancer including small-cell lung cancer, non-small-cell lung cancer, adenocarcinoma of the lung and squamous carcinoma of the lung, cancer of the peritoneum, hepatocellular cancer, gastric or stomach cancer including gastrointestinal cancer, pancreatic cancer, glioblastoma, cervical cancer, ovarian cancer, liver cancer, bladder cancer, hepatoma, breast cancer, colon cancer, rectal cancer, colorectal cancer, endometrial or uterine carcinoma, salivary gland carcinoma, kidney or renal cancer, prostate cancer, vulval cancer, thyroid cancer, hepatic carcinoma, anal carcinoma, penile carcinoma, and head and neck cancer.

### I. Methods of Preparing and Isolating HGF Isoform-Specific Antibodies

[0560] Methods of preparing and isolating antibodies, including polyclonal and monoclonal antibodies and fragments therefrom are well known in the art. Methods of preparing and isolating recombinant and synthetic antibodies also are well known in the art. For example, such antibodies can be constructed using solid phase peptide synthesis or can be produced recombinantly, using nucleotide and amino acid sequence information of the antigen binding sites of antibodies that specifically bind a candidate polypeptide. Antibodies also can be obtained by screening combinatorial libraries containing variable heavy chains and variable light chains, or antigen-binding portions thereof. Methods of preparing, isolating and using polyclonal, monoclonal and non-natural antibodies are reviewed, for example, in Kontermann and Dubel, eds. (2001) “Antibody Engineering” Springer Verlag; Howard and Bethell, eds. (2001) “Basic Methods in Antibody Production and Characterization” CRC Press; and O'Brien and Aitkin, eds. (2001) “Antibody Phage Display” Humana Press. Such antibodies also can be used to screen for the presence of an isoform polypeptide, for example, to detect the expression of an HGF isoform in a cell, tissue or extract.

### J. Assays to Assess or Monitor HGF Isoform Activities

[0561] Generally, the HGF isoforms provided herein exhibit an alteration in structure and also one or more activities compared to a wildtype or predominant form of a ligand. In particular, the isoforms exhibit HGF-antagonist activity and/or anti-angiogenic activity. As such the isoforms are candidate therapeutics. If needed, identified isoforms can be screened using in vitro and in vivo assays to monitor or identify an activity of an HGF isoform and to select HGF isoforms that exhibit such an activity or alteration in activity and/or that exhibit receptor binding or that modulate HGF-mediated MET activation and/or modulate growth factor angiogenic activity.

[0562] Any suitable assay can be employed, including assays exemplified herein. Numerous assays for activities of HGF are known to one of skill in the art. The assays permit comparison of an activity of an HGF isoform to an activity of a wildtype or predominant form of an HGF ligand to identify isoforms that lack an activity. In addition, assays permit identification of isoforms that modulate the activity of a MET receptor or other growth factor receptor such as those involved in angiogenesis including FGFR or VEGFR. Assays for HGF and HGF isoforms include, but are not limited to, ligand binding assays, receptor dimerization/oligomerization assays, MET and ERK phosphorylation assays, proliferation and mitogenic assays, motogenic assays, morphogenic assays, and apoptotic assays.

[0563] Alternatively or in addition, HGF isoforms modulate the activity of a MET and/or bind to or interact with other cell surface proteins such as GAGs, including heparin, or other cell surface proteins involved in angiogenesis, including growth factor receptors and other angiogenic inducing molecules such as αvβ3 integrin or angiomotin. Identified isoforms can be screened for such activities. Assays to screen isoforms to identify activities and functional interactions with MET and/or other cell surface proteins are known to those of skill in the art. One of skill in the art can test a particular isoform for interaction with MET or another cell surface protein and/or test to assess any change in activity compared to an HGF. Some are exemplified herein.

[0564] 1. Ligand Binding Assays and HGF Binding Assays

[0565] HGF isoform binding can be assessed directly by assessing binding of an HGF isoform compared to HGF to cells. In some examples, binding of HGF isoforms to endothelial cells, or other cells known to bind HGF, can be assessed to determine generally if binding of an HGF isoform is altered compared to HGF; either enhanced or inhibited. In other examples, competitive assays can be employed with HGF or other known ligands for binding to cells known to express MET.

[0566] The ability of HGF isoforms to compete with HGF for binding to the MET receptor can be assessed. HGF and HGF isoforms are radioiodinated by the chloramine T method (see Nakamura et al., 1997, Cancer Res. 57, 3305-3313) and specific activities of ¹²⁵I-HGF and ¹²⁵I-HGF isoforms are measured. Cells that normally express the MET receptor are cultured in multiwell plates for the binding assay. The cells are equilibrated in an ice-cold binding buffer and incubated with various concentrations of ¹²⁵I-HGF or ¹²⁵I-HGF isoforms, with or without an excess molar ratio of unlabeled HGF or HGF isoforms. For competitive binding assays, a fixed concentration of ¹²⁵I-HGF and various concentrations of unlabelled HGF or HGF isoforms are incubated with the cells. After the incubation period, the cells are washed, solubilized, and the bound labeled proteins are measured using a γ-counter.

[0567] Binding of HGF to cell surface molecules, including MET or heparin, can be measured directly or indirectly for one or more than one cell surface molecule. For example, the ability of an HGF isoform to bind to heparin can be measured. In another assay, immunoprecipitation is used to assess cell surface molecule binding. Cell lysates are incubated with an HGF isoform. Antibodies against a cell surface molecule, such as αvβ3, heparin, or a growth factor receptor are used to immunoprecipitate the complex. The amount of HGF isoform in the complex is quantified and/or detected using western blotting of the immunoprecipitates with anti-HGF antibodies. Cell surface molecule binding assays also can include binding to ligands in the presence of other molecules. For example, cell surface molecule binding by HGF isoforms can be assessed in the presence of soluble heparin.

[0568] 2. Ligand Dimerization

[0569] Dimerization of an HGF ligand, including an HGF isoform, can be tested to determine if the isoform forms dimers. For example, an isoform can be incubated in the presence or absence of a cross-linking reagent such as bis(sulfosuccinimidyl) suberate. In some examples, heparin can be added to the samples. Following quenching, the samples can be resolved by SDS-PAGE and protein can be detected by staining with Coomassie Blue protein stain or by using an anti-HGF antibody or anti-HGF isoform antibody. Protein bands can be analyzed to assess larger molecular weight bands compared to a protein not incubated with a cross-linking reagent, or a protein incubated in the absence of heparin, such as by assessing the presence of monomers, dimers, and other complexed forms within the samples.

[0570] 3. Complexation

[0571] Complexation, such as dimerization of MET RTKs by an HGF ligand or HGF isoform can be detected and/or measured. Generally, receptor dimerization of an RTK is required for activation. An antagonist of MET signaling binds to MET but is unable to induce dimerization or activation. For example, isolated polypeptides can be mixed together, subject to gel electrophoresis and western blotting. HGF and/or HGF isoforms also can be added to cells and cell extracts, such as whole cell or fractionated extracts, and subjected to gel electrophoresis and western blotting. Antibodies recognizing the polypeptides can be used to detect the presence of monomers, dimers and other complexed forms. In some examples, heparin can be added, or cells can be treated with heparinase before complexation experiments.

[0572] 4. MET and ERK1/2 Phosphorylation Assays

[0573] HGF isoforms can be assessed for their ability to affect activation of the MET receptor or interfere with HGF-induction of MET by measuring the phosphorylation status of MET. Endothelial cells that normally express the MET receptor, such as human dermal microvascular endothelial cells, are serum-starved overnight. The cells are then pre-treated with various concentrations of the HGF isoforms for 10 minutes followed by addition of either HGF or serum-free media. Cells can be treated with sodium orthovanadate (Na₃VO₄) alone for a positive control. After an incubation period, cells are washed and solubilized. Equivalent protein amounts of the cell extracts are immunoprecipitated with an anti-MET antibody, such as anti-MET C-12 (Santa Cruz Biotechnology, Santa Cruz, Calif.). The immunoprecipitates are washed, subjected to separation by SDS-PAGE, and transferred to a membrane. The amount of tyrosine phosphorylation of MET receptor is assessed by immunoreactivity with an anti-phosphotyrosine antibody, such as PY99 or PY20 (Santa Cruz Biotechnology, Santa Cruz, Calif. and Chemicon International, Inc., Temecula, Calif.).

[0574] Another indication of MET receptor induction is the activation of downstream kinases in the MET pathway. Kinases, such ERK1/2, are activated via phosphorylation following HGF-induced MET receptor activation. HGF isoforms can be assessed for their ability to affect ERK1/2 phosphorylation alone or in the presence of HGF. After treatment with HGF isoforms and/or HGF, as described above, whole cell extracts are subjected to SDS-PAGE and transferred to a membrane. The amount of phosphorylated ERK1/2 is assessed by immunoreactivity with an anti-phosphoERK1/2 antibody (New England Biolabs, Beverly, Mass.).

[0575] The assay for ERK1/2 phosphorylation can also be used to assess the ability of HGF isoforms to inhibit the activation of other angiogenic receptors, such as bFGF receptor and VEGF receptor. Following pretreatment with HGF isoforms, cells are incubated with bFGF or VEGF for a period of time. Whole cell extracts are assessed for phosphorylation of ERK1/2 as described above.

[0576] 5. Morphogenic/Angiogenic Assays

[0577] The ability of HGF isoforms to affect HGF-induced angiogenesis in vitro can be assessed by measuring tubule formation. Endothelial cells, such as human umbilical vein endothelial cells (HUVECS) are plated into multiwell plates coated with Matrigel™ (BD Biosciences, San Jose, Calif.) and incubated overnight. The culture medium is then aspirated, and additional Matrigel™ containing either serum-free medium, HGF, HGF isoforms, or HGF with HGF isoforms in combination is overlaid onto the cells. After an overnight incubation, cells are observed under a phase contrast microscope. Random fields of cells are photographed and tubule length is measured. In place of HGF, HGF isoforms can also be co-incubated with other angiogenic factors that stimulate tubule formation, such as bFGF and VEGF, to assess the effects HGF isoforms have on the actions of other factors that stimulate angiogenesis.

[0578] Another version of this assay involves using HGF-producing fibroblasts, such as MRC5 cells, as the source of HGF. Endothelial cells, such as HUVECS, are plated into the lower chamber of a Transwell chamber (6.5 mm diameter polycarbonate membrane, 0.45 μm pore size, Costar) that has been coated with Matrigel™. After overnight incubation, the culture medium is then aspirated and additional Matrigel™ containing either serum-free medium or HGF isoforms is overlaid onto the cells. HGF-expressing MRC5 cells are plated in serum-free medium in the top chamber of the Transwell plate. Tubule length is measured after overnight incubation. Medium from the lower chamber is analyzed to confirm the presence of HGF by ELISA. RNA isolated from the MRC5 cells from the top chamber can also be analyzed by RT-PCR to assess production of HGF.

[0579] Three-dimensional culture in collagen gels can also be used to observe tubule formation in cells, such as MDCK cells. A defined amount of cells is suspended in 0.2% ice-cold collagen solution. After the solution is gelled, medium containing varying concentrations of HGF isoforms and/or HGF is added, and the cells are cultured for 6 hours. Control MDCK cells without HGF treatment will grow as spherical cysts, while treatment with HGF will induce branching tubulogenesis. Inhibition of tubule formation in the presence of HGF isoforms can be assessed by counting the number of tubules and the length of the tubules. In place of HGF, other angiogenic factors, such as FGF-2 and VEGF, can be used to stimulate tubulogenesis in the collagen gels, and the effects of HGF isoforms on their morphogenic activity can be assessed.

[0580] 6. Mitogenic/Proliferation Assays

[0581] The effect of HGF isoforms on HGF-, FGF-2-, and VEGF-induced mitogenic activity of endothelial cells can be assessed by measuring cell proliferation. Endothelial cells at a predetermined density are plated onto gelatinized multiwell tissue culture plates and incubated overnight. Medium is replaced with fresh medium containing varying concentrations of HGF isoforms with HGF, FGF-2, VEGF or combinations thereof. After 72 hours, cells are dispersed with trypsin and counted using a Coulter counter. Quantitation of cell proliferation can also be performed using a 3-(4,5-dimethylthisazol-2-yl)-2,5-diphenyl tetrazolium bromide (MTT) method (see e.g., Yonekura et al. 2003 Biochem J. 370:1097-1109).

[0582] 7. Motogenic/Cell Migration Assays

[0583] HGF isoforms can be assessed for their ability to interfere with HGF-induced cell motility. Endothelial cells are cultured in multiwell plates until firmly adhered to the culture dish surface. Fresh culture medium is then added and overlaid with light mineral oil to prevent evaporation. Medium containing HGF, HGF isoforms, or a combination thereof is added and images are recorded with a digital camera and a time lapse recorder. The distance traveled is calculated from a defined number of cells from each frame.

[0584] Effects of HGF isoforms on HGF-induced cell migration can also be assessed by an endothelial cell wounding assay. Endothelial cells are cultured on plates and grown to reach confluence. Cells are wounded with an 82-gauge needle to produce wounds of approximately 200 μm. The cells are then washed and fresh culture medium is added containing HGF isoforms, HGF, or a combination thereof. Images of cell migration are recorded as described above, and migration distance over the wound front is calculated.

[0585] Cell migration also can be assessed using a modified Boyden chamber assay. Endothelial cells, such as human dermal microvascular endothelial cells, are serum starved and then plated onto the inner chamber of a Transwell plate (6.5 mm diameter polycarbonate membrane, 5 μm pore size, Costar, Cambridge, Mass.) coated with 13.4 μg/ml fibronectin. Medium containing HGF, FGF-2 or VEGF, with or without HGF isoforms, is added to the outer chamber, and incubated for a period of time. The number of cells that migrate through the membrane to the under surface of the filter is quantified by counting the cells in randomly selected microscopic fields in each well.

[0586] Cell locomotion associated with dissociation of cells in response to HGF treatment can be analyzed by a cell scattering assay. The effects HGF isoforms have on HGF-induced cell scattering can be measured. Cells, such as MDCK renal epithelial cells, are cultured in multiwell plates in the presence of HGF isoforms, HGF, or a combination thereof. After overnight incubation, the cells are stained with hemotoxylin and photographed. Control cells, in the absence of HGF, will form tight colonies and maintain cell contacts, whereas HGF treatment induces scattering of the cells.

[0587] 8. Apoptotic Assays

[0588] HGF exerts an anti-apoptotic effect on cells treated with cytotoxic agents, such as irradiation and certain cancer therapeutics, including cisplatin, camtothesin, Adriamycin, and taxol. The ability to HGF isoforms to alter the anti-apoptotic effects of HGF treatment can be measured. Cells are cultured with medium containing varying concentrations of HGF isoforms and/or HGF. Cells are then exposed to the cytotoxic agent for an incubation period, and cell viability is measured using a 3-(4,5-dimethylthisazol-2-yl)-2,5-diphenyl tetrazolium bromide (MTT, Sigma) assay.

[0589] Apoptotic cells show characteristic nuclear fragmentation that can be visualized by nuclear stains. Cells treated with HGF show reduced nuclear fragmentation in response to cytotoxic agents. The ability of HGF isoforms to antagonize this effect of HGF can be assessed. Cells are plated onto glass slides and treated with cytotoxic agents followed by HGF and/or HGF isoforms as described above. Nuclei of the cells are visualized using Hoescht 33342 stain and a fluorescent microscope at excitement wavelength of 350 nm and emission wavelength of 450 nm.

[0590] Nuclear fragmentation is the result of cleavage of genomic DNA during apoptosis and yields double stranded and single strand breaks (“nicks”) that produce laddering of chromosomal DNA, which is inhibited by treatment with HGF. A DNA fragmentation assay can be used to measure the degree of chromosomal DNA laddering in response to cytotoxic agents in the presence of HGF isoforms and/or HGF. After treatment, cells are solubilized, and RNA and proteins are removed from the sample by treatment with RNase A and proteinase K, respectively. Chromosomal DNA is precipitated and electrophoresed on an agarose gel with ethidium bromide to visualize DNA ladders present in apoptotic cells.

[0591] The DNA filter elution assay also can be used to measure the degree of DNA breakage in apoptotic cells. Cells are incubated with [³H] thymidine for 32 hours followed by incubation in isotope free medium for 2 hours. The cells are then pretreated with varying concentrations of the HGF isoforms and/or HGF, followed by treatment with a cytotoxic agent. After an overnight incubation, the cells are resuspended in trypsin and applied to polycarbonate membranes. The cells are lysed on the membrane and alkaline eluted for detection of single strand DNA breaks. The samples are counted on a scintillation counter and measured as Dpm eluted/(dpm filter-bound+dpm total lysates). Larger unfragmented DNA pieces elute more slowly; hence, the amount of DNA eluted as a function of time is proportional to the DNA damage.

[0592] Another method of measuring DNA breakage is the TUNEL stain, which identifies DNA breaks by labeling free 3′-OH termini with modified nucleotides in an enzymatic reaction. This protocol can detect and quantify apoptosis at the single cell level. Commercial kits are available for TUNEL staining, including Apotag In situ Apoptosis detection kit (Invitrogen, Carlsbad, Calif.). Following treatment with HGF isoforms and/or HGF as described above, cells are trypsinized and transferred to glass slides by cytospin centrifugation. Cells are permeabilized followed by immunocytochemistry, which involves the addition of terminal deoxynucleotidyl transferase, digoxygenin-dUTP, anti-digoxygenin HRP, and diaminobenzidine. The cells are counterstained with methyl green and quantified by counting the number of TUNEL-positive cells among a predefined number of cells per slide. The fraction of cells labeled is expressed as an apoptotic index. A positive control for this experiment can include incubation of cells with DNase I to induce DNA strand breaks prior to the labeling procedure.

[0593] Measurement of caspase-3 activity can be another measure of induction of the apoptotic program. After treatment with HGF isoforms and/or HGF as described above, cells are solubilized and incubated with the fluorogenic substrate Ac-DEVD-AFC. An inhibitor for caspase-3, Z-DEVD-CMK (Bio-Rad), can be used for a control. Cleavage of the substrate is assessed by a spectrofluorimeter at excitation wavelength 400 nm and emission wavelength 520 nm. Activity is determined by subtracting the peak values in the presence of the control inhibitor.

[0594] The anti-apoptotic effects of HGF are believed to be mediated via activation of AKT through the phophatidylinositol-3-kinase (PI3K) pathway. In vitro kinase assays can be performed to assess the ability of HGF isoforms to inhibit HGF induction of AKT activity. SK-LMS-1 cells, which overexpress MET receptor, are transfected with plasmids encoding HA-AKT1 or HA-AKT2, and serum starved overnight. Cells are then treated with varying concentrations of HGF isoforms and/or HGF. Treatment with PI3K inhibitors, such as wortmannin or LY294002, prior to addition of HGF can be used as a positive control for AKT inhibition. Cells are lysed and AKT protein is immunoprecipitated using anti-HA antibodies and/or anti-AKT antibodies. Half of the sample is used for normalizing AKT protein amount. The other half of the sample is used for a kinase assay, in which AKT protein is incubated with [γ-³²P]ATP and histone 2B as a substrate. Samples are subjected to SDS/PAGE and autoradiography.

[0595] 9. Animal Models

[0596] a. Tumor Suppression Assays

[0597] Numerous assays are known to those of skill in the art to assess the effects of HGF isoforms on tumor growth and metastasis. Models for various cancers affected by the HGF-MET pathway can include injection of cells or cell lines, including cancerous cells or cells transformed with various growth factors, into target tissues. For example, subcutaneous injection of athymic nude mice with C-127 cells transformed with human HGF and mouse MET produces metastatic tumors in the mice within 2-3 weeks. Recombinant HGF isoforms can be injected at regular intervals for a period of time and tumor size can be measured. In addition, combination therapies including radiation or chemotherapeutic drugs can be delivered in addition to HGF isoform treatment to examine additive or synergistic effects of the anti-tumor therapy.

[0598] Some examples of animal models of cancer that are useful for testing HGF isoform treatment in specific cancers can include:

[0599] Glioma. Malignant gliomas are the most common cancer of the central nervous system and are associated with poor prognosis due to innate resistance to radio- and chemo-therapy. Malignant gliomas express high levels of HGF. Inhibiting HGF signaling has been shown to reverse malignant phenotypes in vitro and in vivo. Mouse models of gliomas involve injection of 9L cells transformed with HGF injected into caudate-putamen of rats to produce brain tumors. Injections of HGF isoforms can be done to analyze size and metastasis of these tumors.

[0600] Other models of glioma include xenografts of cell lines, such as the U-118 human glioma cell line (GBM) that is autocrine for endogenous HGF/MET signaling. GBM cells can be injected subcutaneously into athymic nude mice to produce tumors, and the effects of HGF isoforms on tumor growth can be assessed. Injections of HGF isoforms can be done starting at the time of the xenograft injection or, alternatively, HGF isoforms can be injected intratumor once the tumor has been established.

[0601] Colon cancer. Colon cancer is one of the most common cancers in humans. It is characterized by a high mortality rate due to metastatic disease caused by a high rate of metastasis in the liver. Mouse models of colon cancer metastasis involve injection of MC-38 colon cancer cells into spleens of mice. Metastatic nodules are observed at about 21 days after inoculation. Following treatment with HGF isoforms, the number and size of the tumor nodules, blood vessel density in the nodules, number of apoptotic cells in the nodules, and the degree of MET activation can be assessed.

[0602] Pancreatic Cancer. Pancreatic cancer is a highly malignant form of cancer with a severely poor prognosis. A mouse model of pancreatic cancer involves orthotopic injection of SUIT-2 cells, a pancreatic cancer cell line, into the pancreas of nude mice. Within 4 weeks the mice will develop a large mass that disseminates into the peritoneal cavity. Treatment with HGF isoforms can be done starting at various times during tumor growth to assess survival and tumor growth.

[0603] Additional mouse models for the study of HGF in cancer progression that are available to those of skill in the art can include, but are not limited to: gastric carcinoma, gall bladder carcinoma, lung carcinoma, lymphoma, hepatocellular carcinoma, malignant melanoma, mammary carcinoma, and ovarian carcinoma.

[0604] b. Angiogenic Disease

[0605] Animals models for diseases associated with excessive neovascularization are known to those of skill in the art. In addition to assays of tumor angiogenesis in animal cancer models, animal models are available for the study of diseases such as proliferative diabetic retinopathy. One such model involves transgenic mice that overexpress insulin-like growth factor (IGF-1) in the eye. These mice exhibit vascular occlusion of retinal vessels, venous dilatation and beading, widespread capillary non-perfusion areas, intraretinal microvascular abnormalities (IRMA) and neovascularization within the retina and inside the vitreous. Treatment with HGF isoforms can be done to observe effects of inhibition of HGF signaling on vessel formation. Also the effects HGF isoforms in the presence of angiogenic factors such as VEGF and/or FGF-2 can be studied.

[0606] An additional model for studying vessel proliferation is the corneal micropocket assay, in which corneal neovascularization is induced by pellets containing FGF-2 or VEGF implanted into the corneas of rabbits. The degree of neovascularization in the cornea can be measured in terms of vessel length, number, and branching. Effects of HGF isoforms can be assessed by implantation, injection, or other delivery methods known in the art.

### K. Preparation, Formulation and Administration of HGF Isoforms and HGF Isoform Compositions

[0607] HGF isoforms and HGF isoform compositions can be formulated for administration by any route known to those of skill in the art including intramuscular, intravenous, intradermal, intraperitoneal, subcutaneous, epidural, nasal, oral, rectal, topical, inhalational, buccal (e.g., sublingual), and transdermal administration or any route. HGF isoforms can be administered by any convenient route, for example by infusion or bolus injection, by absorption through epithelial or mucocutaneous linings (e.g., oral mucosa, rectal and intestinal mucosa, etc.) and can be administered with other biologically active agents, either sequentially, intermittently or in the same composition. Administration can be local, topical or systemic depending upon the locus of treatment. Local administration to an area in need of treatment can be achieved by, for example, but not limited to, local infusion during surgery, topical application, e.g., in conjunction with a wound dressing after surgery, by injection, by means of a catheter, by means of a suppository, or by means of an implant. Administration also can include controlled release systems including controlled release formulations and device controlled release, such as by means of a pump. The most suitable route in any given case depends upon a variety of factors, such as the nature of the disease, the progress of the disease, the severity of the disease and the particular composition that is used.

[0608] Various delivery systems are known and can be used to administer HGF isoforms, such as, but not limited to, encapsulation in liposomes, microparticles, microcapsules, recombinant cells capable of expressing the compound, receptor mediated endocytosis, and delivery of nucleic acid molecules encoding HGF isoforms such as retrovirus delivery systems.

[0609] Pharmaceutical compositions containing HGF isoforms can be prepared. Generally, pharmaceutically acceptable compositions are prepared in view of approval by a regulatory agency or otherwise prepared in accordance with generally recognized pharmacopeia for use in animals and in humans. Pharmaceutical compositions can include carriers such as a diluent, adjuvant, excipient, or vehicle with which an isoform is administered. Such pharmaceutical carriers can be sterile liquids, such as water and oils, including those of petroleum, animal, vegetable or synthetic origin, such as peanut oil, soybean oil, mineral oil, and sesame oil. Water is a typical carrier when the pharmaceutical composition is administered intravenously. Saline solutions and aqueous dextrose and glycerol solutions also can be employed as liquid carriers, particularly for injectable solutions. Compositions can contain along with an active ingredient: a diluent such as lactose, sucrose, dicalcium phosphate, or carboxymethylcellulose; a lubricant, such as magnesium stearate, calcium stearate and talc; and a binder such as starch, natural gums, such as gum acaciagelatin, glucose, molasses, polyinylpyrrolidine, celluloses and derivatives thereof, povidone, crospovidones and other such binders known to those of skill in the art. Suitable pharmaceutical excipients include starch, glucose, lactose, sucrose, gelatin, malt, rice, flour, chalk, silica gel, sodium stearate, glycerol monostearate, talc, sodium chloride, dried skim milk, glycerol, propylene, glycol, water, and ethanol. A composition, if desired, also can contain minor amounts of wetting or emulsifying agents, or pH buffering agents, for example, acetate, sodium citrate, cyclodextrine derivatives, sorbitan monolaurate, triethanolamine sodium acetate, triethanolamine oleate, and other such agents. These compositions can take the form of solutions, suspensions, emulsion, tablets, pills, capsules, powders, and sustained release formulations. A composition can be formulated as a suppository, with traditional binders and carriers such as triglycerides. Oral formulation can include standard carriers such as pharmaceutical grades of mannitol, lactose, starch, magnesium stearate, sodium saccharine, cellulose, magnesium carbonate, and other such agents. Examples of suitable pharmaceutical carriers are described in “Remington's Pharmaceutical Sciences” by E. W. Martin. Such compositions will contain a therapeutically effective amount of the compound, generally in purified form, together with a suitable amount of carrier so as to provide the form for proper administration to the patient. The formulation should suit the mode of administration.

[0610] Formulations are provided for administration to humans and animals in unit dosage forms, such as tablets, capsules, pills, powders, granules, sterile parenteral solutions or suspensions, and oral solutions or suspensions, and oil water emulsions containing suitable quantities of the compounds or pharmaceutically acceptable derivatives thereof. Pharmaceutically therapeutically active compounds and derivatives thereof are typically formulated and administered in unit dosage forms or multiple dosage forms. Each unit dose contains a predetermined quantity of therapeutically active compound sufficient to produce the desired therapeutic effect, in association with the required pharmaceutical carrier, vehicle or diluent. Examples of unit dose forms include ampoules and syringes and individually packaged tablets or capsules. Unit dose forms can be administered in fractions or multiples thereof. A multiple dose form is a plurality of identical unit dosage forms packaged in a single container to be administered in segregated unit dose form. Examples of multiple dose forms include vials, bottles of tablets or capsules or bottles of pints or gallons. Hence, multiple dose form is a multiple of unit doses that are not segregated in packaging.

[0611] Dosage forms or compositions containing active ingredient in the range of 0.005% to 100% with the balance made up from non-toxic carrier can be prepared. For oral administration, pharmaceutical compositions can take the form of, for example, tablets or capsules prepared by conventional means with pharmaceutically acceptable excipients such as binding agents (e.g., pregelatinized maize starch, polyvinyl pyrrolidone or hydroxypropyl methylcellulose); fillers (e.g., lactose, microcrystalline cellulose or calcium hydrogen phosphate); lubricants (e.g., magnesium stearate, talc or silica); disintegrants (e.g., potato starch or sodium starch glycolate); or wetting agents (e.g., sodium lauryl sulphate). The tablets can be coated by methods well-known in the art.

[0612] Pharmaceutical preparation also can be in liquid form, for example, solutions, syrups or suspensions, or can be presented as a drug product for reconstitution with water or other suitable vehicle before use. Such liquid preparations can be prepared by conventional means with pharmaceutically acceptable additives such as suspending agents (e.g., sorbitol syrup, cellulose derivatives or hydrogenated edible fats); emulsifying agents (e.g., lecithin or acacia); non-aqueous vehicles (e.g., almond oil, oily esters, or fractionated vegetable oils); and preservatives (e.g., methyl or propyl-p-hydroxybenzoates or sorbic acid).

[0613] Formulations suitable for rectal administration can be provided as unit dose suppositories. These can be prepared by admixing the active compound with one or more conventional solid carriers, for example, cocoa butter, and then shaping the resulting mixture.

[0614] Formulations suitable for topical application to the skin or to the eye include ointments, creams, lotions, pastes, gels, sprays, aerosols and oils. Exemplary carriers include vaseline, lanoline, polyethylene glycols, alcohols, and combinations of two or more thereof. The topical formulations also can contain 0.05 to 15, 20, 25 percent by weight of thickeners selected from among hydroxypropyl methyl cellulose, methyl cellulose, polyvinylpyrrolidone, polyvinyl alcohol, poly(alkylene glycols), poly/hydroxyalkyl, (meth)acrylates or poly(meth)acrylamides. A topical formulation is often applied by instillation or as an ointment into the conjunctival sac. It also can be used for irrigation or lubrication of the eye, facial sinuses, and external auditory meatus. It also can be injected into the anterior eye chamber and other places. A topical formulation in the liquid state can be also present in a hydrophilic three-dimensional polymer matrix in the form of a strip or contact lens, from which the active components are released.

[0615] For administration by inhalation, the compounds for use herein can be delivered in the form of an aerosol spray presentation from pressurized packs or a nebulizer, with the use of a suitable propellant, e.g., dichlorodifluoromethane, trichlorofluoromethane, dichlorotetrafluoroethane, carbon dioxide or other suitable gas. In the case of a pressurized aerosol, the dosage unit can be determined by providing a valve to deliver a metered amount. Capsules and cartridges of, e.g., gelatin, for use in an inhaler or insufflator can be formulated containing a powder mix of the compound and a suitable powder base such as lactose or starch.

[0616] Formulations suitable for buccal (sublingual) administration include, for example, lozenges containing the active compound in a flavored base, usually sucrose and acacia or tragacanth; and pastilles containing the compound in an inert base such as gelatin and glycerin or sucrose and acacia.

[0617] Pharmaceutical compositions of HGF isoforms can be formulated for parenteral administration by injection e.g., by bolus injection or continuous infusion. Formulations for injection can be presented in unit dosage form, e.g., in ampoules or in multi-dose containers, with an added preservative. The compositions can be suspensions, solutions or emulsions in oily or aqueous vehicles, and can contain formulatory agents such as suspending, stabilizing and/or dispersing agents. Alternatively, the active ingredient can be in powder form for reconstitution with a suitable vehicle, e.g., sterile pyrogen-free water or other solvents, before use.

[0618] Formulations suitable for transdermal administration are provided. They can be provided in any suitable format, such as discrete patches adapted to remain in intimate contact with the epidermis of the recipient for a prolonged period of time. Such patches contain the active compound in optionally buffered aqueous solution of, for example, 0.1 to 0.2M concentration with respect to the active compound. Formulations suitable for transdermal administration also can be delivered by iontophoresis (see, e.g., Pharmaceutical Research 3(6), 318 (1986)) and typically take the form of an optionally buffered aqueous solution of the active compound.

[0619] Pharmaceutical compositions also can be administered by controlled release formulations and/or delivery devices (see, e.g., in U.S. Pat. Nos. 3,536,809; 3,598,123; 3,630,200; 3,845,770; 3,847,770; 3,916,899; 4,008,719; 4,687,610; 4,769,027; 5,059,595; 5,073,543; 5,120,548; 5,354,566; 5,591,767; 5,639,476; 5,674,533 and 5,733,566).

[0620] In certain embodiments, liposomes and/or nanoparticles also can be employed with HGF isoform administration. Liposomes are formed from phospholipids that are dispersed in an aqueous medium and spontaneously form multilamellar concentric bilayer vesicles, also termed multilamellar vesicles (MLVs). MLVs generally have diameters of from 25 nm to 4 μm. Sonication of MLVs results in the formation of small unilamellar vesicles (SUVs) with diameters in the range of 200 to 500. ANG., containing an aqueous solution in the core.

[0621] Phospholipids can form a variety of structures other than liposomes when dispersed in water, depending on the molar ratio of lipid to water. At low ratios, the liposomes form. Physical characteristics of liposomes depend on pH, ionic strength and the presence of divalent cations. Liposomes can show low permeability to ionic and polar substances, but at elevated temperatures undergo a phase transition which markedly alters their permeability. The phase transition involves a change from a closely packed, ordered structure, known as the gel state, to a loosely packed, less-ordered structure, known as the fluid state. This occurs at a characteristic phase-transition temperature and results in an increase in permeability to ions, sugars and drugs.

[0622] Liposomes interact with cells via different mechanisms: Endocytosis by phagocytic cells of the reticuloendothelial system such as macrophages and neutrophils; adsorption to the cell surface, either by nonspecific weak hydrophobic or electrostatic forces, or by specific interactions with cell-surface components; fusion with the plasma cell membrane by insertion of the lipid bilayer of the liposome into the plasma membrane, with simultaneous release of liposomal contents into the cytoplasm; and by transfer of liposomal lipids to cellular or subcellular membranes, or vice versa, without any association of the liposome contents. Varying the liposome formulation can alter which mechanism is operative, although more than one may operate at the same time.

[0623] Nanocapsules can generally entrap compounds in a stable and reproducible way. To avoid side effects due to intracellular polymeric overloading, such ultrafine particles (sized around 0.1 μm) should be designed using polymers able to be degraded in vivo. Biodegradable polyalkyl-cyanoacrylate nanoparticles that meet these requirements are contemplated for use herein, and such particles can be easily made.

[0624] Administration methods can be employed to decrease the exposure of HGF isoforms to degradative processes, such as proteolytic degradation and immunological intervention via antigenic and immunogenic responses. Examples of such methods include local administration at the site of treatment. Pegylation of therapeutics has been reported to increase resistance to proteolysis, increase plasma half-life, and decrease antigenicity and immunogenicity. Examples of pegylation methodologies are known in the art (see for example, Lu and Felix, Int. J. Peptide Protein Res., 43: 127-138, 1994; Lu and Felix, Peptide Res., 6: 142-6, 1993; Felix et al., Int. J. Peptide Res., 46: 253-64, 1995; Benhar et al., J. Biol. Chem., 269: 13398-404, 1994; Brumeanu et al., J Immunol., 154: 3088-95, 1995; see also, Caliceti et al. (2003) Adv. Drug Deliv. Rev. 55(10): 1261-77 and Molineux (2003) Pharmacotherapy 23 (8 Pt 2):3S-8S). Pegylation also can be used in the delivery of nucleic acid molecules in vivo. For example, pegylation of adenovirus can increase stability and gene transfer (see, e.g., Cheng et al. (2003) Pharm. Res. 20(9): 1444-51).

[0625] Desirable blood levels can be maintained by a continuous infusion of the active agent as ascertained by plasma levels. It should be noted that the attending physician would know how to and when to terminate, interrupt or adjust therapy to lower dosage due to toxicity, or bone marrow, liver or kidney dysfunctions. Conversely, the attending physician would also know how, and when, to adjust treatment to higher levels if the clinical response is not adequate (precluding toxic side effects). The active agent is administered, for example, by oral, pulmonary, parental (intramuscular, intraperitoneal, intravenous (IV) or subcutaneous injection), inhalation (via a fine powder formulation), transdermal, nasal, vaginal, rectal, or sublingual routes of administration and can be formulated in dosage forms appropriate for each route of administration (see, e.g., International PCT application Nos. WO 93/25221 and WO 94/17784; and European Patent Application 613,683).

[0626] An HGF isoform is included in the pharmaceutically acceptable carrier in an amount sufficient to exert a therapeutically useful effect in the absence of undesirable side effects on the patient treated. Therapeutically effective concentrations can be determined empirically by testing the compounds in known in vitro and in vivo systems, such as the assays provided herein.

[0627] The concentration of an HGF isoform in the composition depends on absorption, inactivation and excretion rates of the complex, the physicochemical characteristics of the complex, the dosage schedule, and amount administered as well as other factors known to those of skill in the art. The amount of an HGF isoform to be administered for the treatment of a disease or condition, for example cancer or angiogenesis treatment, can be determined by standard clinical techniques. In addition, in vitro assays and animal models can be employed to help identify optimal dosage ranges. The precise dosage, which can be determined empirically, can depend upon the route of administration and the seriousness of the disease. Suitable dosage ranges for administration can range from about 0.01 pg/kg body weight to 1 mg/kg body weight and more typically 0.05 mg/kg to 200 mg/kg HGF isoform: patient weight.

[0628] An HGF isoform can be administered once, or can be divided into a number of smaller doses to be administered at intervals of time. HGF isoforms can be administered in one or more doses over the course of a treatment time, for example over several hours, days, weeks, or months. In some cases, continuous administration is useful. It is understood that the precise dosage and duration of treatment is a function of the disease being treated and can be determined empirically using known testing protocols or by extrapolation from in vivo or in vitro test data. It is to be noted that concentrations and dosage values also can vary with the severity of the condition to be alleviated. It is to be further understood that for any particular subject, specific dosage regimens should be adjusted over time according to the individual need and the professional judgment of the person administering or supervising the administration of the compositions, and that the concentration ranges set forth herein are exemplary only and are not intended to limit the scope or use of compositions and combinations containing them. The compositions can be administered hourly, daily, weekly, monthly, yearly or once. The mode of administration of the composition containing the polypeptides as well as compositions containing nucleic acids for gene therapy, includes, but is not limited to intralesional, intraperitoneal, intramuscular and intravenous administration. Also included are infusion, intrathecal, subcutaneous, liposome-mediated and depot-mediated administration. Also included are nasal, ocular, oral, topical, local and otic delivery. Dosages can be empirically determined and depend upon the indication, mode of administration and the subject. Exemplary dosages include from 0.1, 1, 10, 100, 200 and more mg/day/kg weight of the subject.

### L. In Vivo Expression of HGF isoforms and Gene Therapy

[0629] HGF isoforms can be delivered to cells and tissues by expression of nucleic acid molecules. HGF isoforms can be administered as nucleic acid molecules encoding an HGF isoform, including ex vivo techniques and direct in vivo expression.

[0630] 1. Delivery of HGF

[0631] Nucleic acids can be delivered to cells and tissues by any method known to those of skill in the art.

[0632] a. Vectors—Episomal and Integrating

[0633] Methods for administering HGF isoforms by expression of encoding nucleic acid molecules include administration of recombinant vectors. The vector can be designed to remain episomal, such as by inclusion of an origin of replication or can be designed to integrate into a chromosome in the cell. Recombinant vectors can include viral vectors and non-viral vectors. Non-limiting viral vectors include, for example, adenoviral vectors, herpes virus vectors, retroviral vectors, and any other viral vector known to one of skill in the art. Non-limiting non-viral vectors include artificial chromosomes or liposomes or other non-viral vectors. HGF isoforms also can be used in ex vivo gene expression therapy using viral and non-viral vectors. For example, cells can be engineered to express an HGF isoform, such as by integrating an HGF isoform-encoding nucleic acid into a genomic location, either operatively linked to regulatory sequences or such that it is placed operatively linked to regulatory sequences in a genomic location. Such cells then can be administered locally or systemically to a subject, such as a patient in need of treatment.

[0634] An HGF isoform can be expressed by a virus, which is administered to a subject in need of treatment. Virus vectors suitable for gene therapy include adenovirus, adeno-associated virus, retroviruses, lentiviruses and others noted above. For example, adenovirus expression technology is well-known in the art and adenovirus production and administration methods also are well known. Adenovirus serotypes are available, for example, from the American Type Culture Collection (ATCC, Rockville, Md.). Adenovirus can be used ex vivo, for example, cells are isolated from a patient in need of treatment, and transduced with an HGF isoform-expressing adenovirus vector. After a suitable culturing period, the transduced cells are administered to a subject, locally and/or systemically. Alternatively, HGF isoform-expressing adenovirus particles are isolated and formulated in a pharmaceutically-acceptable carrier for delivery of a therapeutically effective amount to prevent, treat or ameliorate a disease or condition of a subject. Typically, adenovirus particles are delivered at a dose ranging from 1 particle to 1014 particles per kilogram subject weight, generally between 106 or 108 particles to 1012 particles per kilogram subject weight. In some situations it is desirable to provide a nucleic acid source with an agent that targets cells, such as an antibody specific for a cell surface membrane protein or a target cell, or a ligand for a receptor on a target cell.

[0635] b. Artificial Chromosomes and Other Non-Viral Vector Delivery Methods

[0636] The nucleic acid molecules can be introduced into artificial chromosomes and other non-viral vectors. Artificial chromosomes (see, e.g., U.S. Pat. No. 6,077,697 and PCT International PCT application No. WO 02/097059) can be engineered to encode and express the isoform.

[0637] c. Liposomes and Other Encapsulated Forms and Administration of Cells Containing the Nucleic Acids

[0638] The nucleic acids can be encapsulated in a vehicle, such as a liposome, or introduced into a cell, such as a bacterial cell, particularly an attenuated bacterium, or introduced into a viral vector. For example, when liposomes are employed, proteins that bind to a cell surface membrane protein associated with endocytosis can be used for targeting and/or to facilitate uptake, e.g. capsid proteins or fragments thereof tropic for a particular cell type, antibodies for proteins which undergo internalization in cycling, and proteins that target intracellular localization and enhance intracellular half-life.

[0639] 2. In Vitro and Ex Vivo Delivery

[0640] For ex vivo and in vivo methods, nucleic acid molecules encoding the HGF isoform is introduced into cells that are from a suitable donor or the subject to be treated. Cells into which a nucleic acid can be introduced for purposes of therapy include, for example, any desired, available cell type appropriate for the disease or condition to be treated, including but not limited to, epithelial cells, endothelial cells, keratinocytes, fibroblasts, muscle cells, hepatocytes, blood cells such as T lymphocytes, B lymphocytes, monocytes, macrophages, neutrophils, eosinophils, megakaryocytes, granulocytes; various stem or progenitor cells, in particular hematopoietic stem or progenitor cells, e.g., such as stem cells obtained from bone marrow, umbilical cord blood, peripheral blood, fetal liver, and other sources thereof.

[0641] For ex vivo treatment, cells from a donor compatible with the subject to be treated, or cells from the subject to be treated, are removed, the nucleic acid is introduced into these isolated cells and the modified cells are administered to the subject. Treatment includes direct administration, such as, for example, encapsulated within porous membranes, which are implanted into the patient (see, e.g. U.S. Pat. Nos. 4,892,538 and 5,283,187). Techniques suitable for the transfer of nucleic acid into mammalian cells in vitro include the use of liposomes and cationic lipids (e.g., DOTMA, DOPE and DC-Chol), electroporation, microinjection, cell fusion, DEAE-dextran, and calcium phosphate precipitation methods. Methods of DNA delivery can be used to express HGF isoforms in vivo. Such methods include liposome delivery of nucleic acids and naked DNA delivery, including local and systemic delivery such as using electroporation, ultrasound and calcium-phosphate delivery. Other techniques include microinjection, cell fusion, chromosome-mediated gene transfer, microcell-mediated gene transfer and spheroplast fusion.

[0642] In vivo expression of an HGF isoform can be linked to expression of additional molecules. For example, expression of an HGF isoform can be linked with expression of a cytotoxic product such as in an engineered virus or expressed in a cytotoxic virus. Such viruses can be targeted to a particular cell type that is a target for a therapeutic effect. The expressed HGF isoform can be used to enhance the cytotoxicity of the virus.

[0643] In vivo expression of an HGF isoform can include operatively linking an HGF isoform encoding nucleic acid molecule to specific regulatory sequences such as a cell-specific or tissue-specific promoter. HGF isoforms also can be expressed from vectors that specifically infect and/or replicate in target cell types and/or tissues. Inducible promoters can be use to selectively regulate HGF isoform expression.

[0644] 3. Systemic, Local and Topical Delivery

[0645] Nucleic acid molecules, as naked nucleic acids or in vectors, artificial chromosomes, liposomes and other vehicles can be administered to the subject by systemic administration, topical, local and other routes of administration. When systemic and in vivo, the nucleic acid molecule or vehicle containing the nucleic acid molecule can be targeted to a cell.

[0646] Administration also can be direct, such as by administration of a vector or cells that typically targets a cell or tissue. For example, tumor cells and proliferating cells can be targeted cells for in vivo expression of HGF isoforms. Cells used for in vivo expression of an isoform also include cells autologous to the patient. Such cells can be removed from a patient, nucleic acids for expression of an HGF isoform introduced, and then administered to a patient such as by injection or engraftment.

### M. HGF and Cancer and Angiogenesis

[0647] HGF plays a significant role in mediating mitogenesis, morphogenesis, motogenesis, and angiogenesis through its receptor MET. In cancer, these activities are involved in the growth, neovascularization, and metastasis of tumors (see e.g., FIG. 1). Metastases of primary tumors are often associated with high mortality rates in cancer patients, and treatments that decrease the metastatic processes of tumor growth, including tumor-induced angiogenesis, may elevate the prognoses in malignant cancers. In addition to cancer, the angiogenic properties of HGF contribute to the progression of various vascular diseases, including rheumatoid arthritis and proliferative diabetic retinopathy. HGF isoforms, such as HGF isoforms provided herein, can be used as antagonists of MET to inhibit cancer growth and spread and also can be used as general angio-inhibitory molecules to inhibit angiogenesis associated with cancer progression or other vascular diseases.

[0648] 1. Tumor Growth and Metastasis

[0649] HGF regulates cellular processes including proliferation, apoptosis, migration, and morphogenesis, which contribute to the invasive, angiogenic, and metastatic responses associated with malignant behavior in cancer. The receptor for HGF, MET, was originally isolated as an oncogenic fusion protein, encoded by tpr-met, with constitutive, ligand-independent tyrosine kinase activity and the ability to transform cells. Excessive activation of MET can induce tumor growth, tumor cell motility, invasion of extracellular matrices and angiogenesis. A large number of cancers, including carcinomas of the bladder, breast, cervix, colon, esophagus, stomach, head and neck, kidney, liver, lung, pharynx, ovary, pancreas, prostate and thyroid, musculoskeletal sarcomas, soft tissue sarcomas, hematopoietic malignancies, glioblastomas, melanomas, mesotheliomas and Wilm's Tumor, exhibit elevated levels of HGF and/or MET expression that contribute to autocrine upregulation of HGF signaling. Mutations in the c-met gene also have been identified in carcinomas of the stomach, head and neck, kidney, liver, lung, ovary, and thyroid. Transgenic mice that are engineered to express high levels HGF develop a broad array of histologically distinct tumors of mesenchymal and epithelial origin. In animal models of cancers with elevated MET and/or HGF expression, treatments with inhibitors that block activation of the MET receptor have been successful in affecting tumor growth and metastasis.

[0650] Progression of cancer from transformation to malignancy and metastasis is a multistep process that involves enhanced cellular proliferation, evasion of cell death, disruption of cell-cell contacts, degradation of the extracellular matrix, and increased cell motility and morphogenesis. HGF has been implicated in the regulation of each of these processes relating to the establishment and invasiveness of the primary tumor and to the metastatic cascade, whereby cells detach from the primary tumor and travel via the circulatory system to distal sites to form secondary tumors.

[0651] a. Mitogenesis

[0652] Stimulation of HGF can induce cellular proliferation. Although the mitogenic potential of HGF can vary depending on the type of cancer, HGF clearly exhibits several cell cycle promoting activities. HGF treatment can induce mitogenic signaling pathways such as the MEK/ERK pathway. HGF can also down-regulate p27kip1, which causes an accumulation of hyperphosphorylated Rb protein that advances cell cycle entry. In addition, HGF signaling can lead to the accumulation of β-catenin, which promotes formation of the LEF/TCF transcription factor complex that upregulates cell cycle regulators involved in oncogenic transformation.

[0653] The mitogenic properties of HGF are also linked to inhibition of apoptosis. Upregulation of cellular survival factors is a critical feature of cancer cells and contributes to their ability to escape apoptotic cell death. HGF treatment has been shown to protect cells against apoptosis induced by serum starvation, UV irradiation, and other cytotoxic agents. Constitutive expression of activated MET in cells, such as hepatocytes, can also inhibit apoptosis. The anti-apoptotic effects of HGF are mediated in part by activation of Akt kinase via the phosphatidylinositol 3-kinase (PI3K) pathway. In support of this, studies have shown that the anti-apoptotic effects of HGF can be blocked by treatment with PI3K inhibitors, such as LY294002. In addition, HGF can induce the expression and/or activation of anti-apoptotic proteins, including BCL-xL, MAPK, and GATA-4. HGF signaling can also interfere with the activation of certain caspases that are important for the apoptotic program. The MET receptor also has the ability to directly bind to Fas and prevent Fas-induced apoptosis.

[0654] HGF treatment can inhibit the apoptotic effects induced by DNA damaging agents, including cytotoxic agents used in the treatment of cancer. Studies have shown that HGF treatment promotes cell survival in lung cancer, glioblastoma cells, colon cancer cells, breast cancer cells, squamous cell carcinoma of the head and neck, myeloma cells, and in epithelial cell lines. As an example, HGF treatment of MDA-MB-453 human breast cancer cells, EMT6 mouse mammary tumor cells, U373 glioblastoma cells or MDCK renal epithelial cells protects the cells against apoptosis induced by cytotoxic agents, such as adriamycin (ADR), cisplatin, camtothesin, taxol, X-rays, gamma irradiation, or ultraviolet radiation. Given the effects of HGF on the inhibition of apoptosis, accumulation of HGF in cancerous cells may contribute to radio- and chemo-resistant phenotypes that have been observed in cancer therapy. Inhibitors of HGF signaling thus have the potential to be used in combination therapies with conventional cytotoxic agents for the treatment of cancer.

[0655] b. Motogenesis and Morphogenesis

[0656] The ability of cancer cells to invade surrounding tissue and to migrate to distal sites depends on the stimulation of cell motility and involves the morphogenesis of epithelial and endothelial cell types. These processes are also important for normal organ development and wound healing. In cancer, however, dysregulation of cell motility and morphogenesis contributes to cancer progression and metastasis. It is also important for tumor angiogenesis as discussed below. Treatment of cancer cells with HGF promotes rapid migration of cells over a number of matrices. HGF can stimulate movement and morphogenesis of cells though activation of components of the rho/rac pathway. This pathway is important for cytoskeletal rearrangement and cell-substrate adhesion. Several members of the rho family are aberrantly expressed in cancers. Upon HGF stimulation, the MET receptor is phosphorylated on multiple tyrosine residues that serve as docking sites for signaling molecules, including c-Cbl, PI3K, Grb2, Shc, Crk, and Gab-1. These proteins in turn activate downstream signaling pathways that connect with the cytoskeletal machinery leading to breakdown of adherens junctions, stimulation of membrane ruffling, and directional cell movement.

[0657] Another important factor in cell migration in tumor metastasis is the disruption of cell contacts to promote dissociation and scattering of cells from their anchored positions. HGF signaling promotes cell scattering via β-catenin assisted pathways leading to shedding and redistribution of cadherins, such as E-cadherin, that are important for maintaining cell-cell contacts.

[0658] Invasion of cancer cells into the surrounding tissue also requires the degradation of the extracellular matrix. HGF contributes to the invasiveness of cancer cells through stimulation of proteolytic enzyme secretion, including matrix metalloproteinases, such as MMp2, MMP7, and MMp9, and serine proteases such as the plasminogen activator uPA. This breakdown of the extracellular matrix aids in migration of the metastatic cells from the primary tumor site and in the invasive ability of the cells at distal docking sites. HGF is also often stored within the extracellular matrix in the tumor tissue. Following secretion of proteolytic enzymes, this ready source of HGF is released, further aiding in the cancer cell migration and invasion. Heparin sulfate glycosaminoglycans in the extracellular matrix can also bind to MET independently of HGF and may regulate motility.

[0659] At distal locations of secondary tumor growth, cell surface molecules such as CD44 and integrins play a role in anchoring the metastatic cell to the distal site of invasion. HGF expression can induce the expression of CD44. In addition, MET plays a critical role in docking via its interaction with integrins, such as α6β4 integrin.

[0660] 2. Angiogenesis

[0661] Cellular receptors for angiogenic factors (positive and negative) can act as points of intervention in multiple disease processes, for example, in diseases and conditions where the balance of angiogenic growth factors has been altered and/or the amount or timing of angiogenesis is altered. For example, in some situations ‘too much’ angiogenesis can be detrimental, such as angiogenesis that supplies blood to tumor foci, and in inflammatory responses and other aberrant angiogenic-related conditions. The growth of tumors, or sites of proliferation in chronic inflammation, generally requires the recruitment of neighboring blood vessels and vascular endothelial cells to support their metabolic requirements. This is because the diffusion is limited for oxygen in tissues. Exemplary conditions that require angiogenesis include, but are not limited to solid tumors and hematologic malignancies such as lymphomas, acute leukemia and multiple myeloma, where increased numbers of blood vessels are observed in the pathologic bone marrow. Stimuli for angiogenesis include hypoxia, inflammation and genetic lesions in oncogenes or tumor suppressors that alter disease cell gene expression.

[0662] a. The Angiogenic Process

[0663] Angiogenesis includes several steps, including the recruitment of circulating endothelial cell precursors (CEPs), stimulation of new endothelial cell (EC) growth by growth factors, the degradation of the ECM by proteases, proliferation of ECs and migration into the target, which could be a tumor site or another proliferative site caused by inflammation. This results in the eventual formation of new capillary tubes. Such blood vessels are not necessarily normal in structure. They may have chaotic architecture and blood flow. Due to an imbalance of angiogenic regulators such as vascular endothelial growth factor (VEGF), and angiopoietins, the new vessels supplying tumorous or inflammatory sites are tortuous and dilated with an uneven diameter, excessive branching, and shunting. Blood flow is variable, with areas of hypoxia and acidosis leading to the selection of variants that are resistant to hypoxia-induced apoptosis (often due to the loss of p53 expression); and enhanced production of pro-angiogenic signals. Disease-associated vessel walls have numerous openings, widened interendothelial junctions, and a discontinuous or absent basement membrane; this contributes to the high vascular permeability of these vessels and, together with lack of functional lymphatics/drainage, causes interstitial hypertension. Disease-associated blood vessels may lack perivascular cells such as pericytes and smooth muscle cells that normally regulate vasoactive control in response to tissue metabolic needs. Unlike normal blood vessels, the vascular lining of tumor vessels is not a homogenous layer of ECs but often contains a mosaic of ECs and tumor cells; the concept of cancer cell-derived vascular channels, which may be lined by ECM secreted by the tumor cells, is referred to as vascular mimicry.

[0664] A similar situation occurs where blood vessels rapidly invade sites of acute inflammation. The ECs of angiogenic blood vessels are unlike quiescent ECs found in adult vessels, where only 0.01% of ECs are dividing. During tumor angiogenesis, ECs are highly proliferative and express a number of plasma membrane proteins that are characteristic of activated endothelium, including growth factor receptors and adhesion molecules such as integrins. Tumors utilize a number of mechanisms to promote their vascularization, and in each case they subvert normal angiogenic processes to suit this purpose. For this reason, increased production of angiogenic factors, proliferative with respect to endothelium and structure (allowing for increased branching of the neovasculature), are likely to occur in disease foci, as in cancer or chronic inflammatory disease.

[0665] b. Cell Surface Receptors in Angiogenesis

[0666] Cell surface receptors, including receptor tyrosine kinases (RTKs) and their ligands, play a role in the regulation of angiogenesis. Angiogenic endothelium expresses a number of receptors not found on resting endothelium. These include RTKs (i.e. FGF, PDGF and VEGF receptors) and integrins that bind to the extracellular matrix and mediate endothelial cell adhesion, migration, and invasion. Functions mediated by activated RTK include proliferation, migration, and enhanced survival of endothelial cells, as well as regulation of the recruitment of perivascular cells and bloodborne circulating endothelial precursors and hematopoietic stem cells to the tumor.

[0667] Additional signaling pathways also are involved in angiogenesis. The angiopoietin, Ang1, produced by stromal cells, binds to the RTK Tie-2 and promotes the interaction of endothelial cells with the extracellular matrix and perivascular cells, such as pericytes and smooth muscle cells, to form tight, non-leaky vessels. PDGF and basic fibroblast growth factor (bFGF, also called FGF-2) help to recruit these perivascular cells. Ang1 is required for maintaining the quiescence and stability of mature blood vessels and prevents the vascular permeability normally induced by VEGF and inflammatory cytokines.

[0668] Pro-angiogenic cytokines, chemokines, and growth factors secreted by stromal cells or inflammatory cells make important contributions to neovascularization, including bFGF, transforming growth factor-alpha, TNF-alpha, and IL-8. In contrast to normal endothelium, angiogenic endothelium overexpresses specific members of the integrin family of extracellular matrix-binding proteins that mediate endothelial cell adhesion, migration, and survival. Integrins mediate spreading and migration of endothelial cells and are required for angiogenesis induced by HGF, VEGF and bFGF, which in turn can upregulate endothelial cell integrin expression. VEGF promotes the mobilization and recruitment of circulating endothelial cell precursors (CEPs) and hematopoietic stem cells (HSCs) to tumors where they colocalize and appear to cooperate in neovessel formation. CEPs express VEGFR2, while HSCs express VEGFR1, a receptor, or VEGF and PlGF. Both CEPs and HSCs are derived from a common precursor, the hemangioblast. CEPs are thought to differentiate into endothelial cells, whereas the role of HSC-derived cells (such as tumor-associated macrophages) may be to secrete angiogenic factors required for sprouting and stabilization of endothelial cells (VEGF, bFGF, angiopoietins) and to activate matrix metalloproteinases (MMPs), resulting in extracellular matrix remodeling and growth factor release. In mouse tumor models and in human cancers, increased numbers of CEPs and subsets of VEGFR1 or VEGFR-expressing HSCs can be detected in the circulation, which may correlate with increased levels of serum VEGF. HGF also contributes to normal physiological angiogenesis that occurs during embryonic development, wound healing, and tissue regeneration.

[0669] c. HGF in Tumor Angiogenesis

[0670] Neovascularization is a critical process in tumor growth. A critical element in the growth of primary tumors and formation of metastatic sites is the ability of the tumor to promote the formation of new capillaries from preexisting host vessels. Tumor-associated angiogenesis is a complex process involving many different cell types that proliferate, migrate, invade, and differentiate in response to signals from the microenvironment. Endothelial cells sprout from host vessels in response to HGF, VEGF, bFGF, Ang2, and other pro-angiogenic stimuli. Sprouting is stimulated by HGF/MET, VEGF/VEGFR2, Ang2/Tie-2, and integrin/extracellular matrix interactions. Bone marrow-derived circulating endothelial precursors migrate to the tumor in response to VEGF and differentiate into endothelial cells, while hematopoietic stem cells differentiate into leukocytes, including tumor-associated macrophages that secrete angiogenic growth factors and produce matrix metalloproteinases (MMPs) that remodel the extracellular matrix and release bound growth factors.

[0671] HGF contributes to angiogenesis by stimulation of morphogenic changes that promote angiogenesis in vascular endothelial cells. HGF signaling stimulates branching tubulogenesis in endothelial cells and alters endothelial cell motility. HGF can also upregulate the expression of angiogenic factors, including VEGF and IL-8, and the downregulation angiogenic suppressive factors, such as thrombospondin-1 (TPS-1), which inhibit endothelial cell proliferation and induce endothelial cell apoptosis. HGF also takes part in mediating epithelial to mesenchymal transition and formation of tubule and lumens necessary for angiogenesis. Although HGF signaling through the MET receptor plays an import role in the morphological changes associated with angiogenesis, studies with HGF antagonists have revealed that HGF angiogenic activities may partially function though activation of FGF and/or VEGF receptors.

[0672] When tumor cells arise in, or metastasize to, an avascular area, they grow to a size limited by hypoxia and nutrient deprivation. This condition, also likely to occur in other localized proliferative diseases, leads to the selection of cells that produce angiogenic factors. Hypoxia, a key regulator of tumor angiogenesis, causes the transcriptional induction of VEGF and HGF by a process that involves stabilization of the transcription factor hypoxia-inducible factor (HIF)1. Under normoxic conditions, EC HIF-1 levels are maintained at a low level by proteasome-mediated destruction regulated by a ubiquitin E3-ligase encoded by the VHL tumor-suppressor locus. Under hypoxic conditions, the HIF-1 protein is not hydroxylated and association with VHL does not occur; therefore HIF-1 levels increase, and target genes including HGF, VEGF, nitric oxide synthetase (NOS), and Ang2 are induced. Loss of the VHL genes, as occurs in familial and sporadic renal cell carcinomas, also results in HIF-1 stabilization and induction of VEGF. Most tumors have hypoxic regions due to poor blood flow, and tumor cells in these areas stain positive for HIF-1 expression.

[0673] d. HGF in Other Vascular Diseases

[0674] Angiogenesis also plays a role in inflammatory diseases. These diseases have a proliferative component, similar to a tumor focus. In rheumatoid arthritis, one component of this is characterized by aberrant proliferation of synovial fibroblasts, resulting in pannus formation. The pannus is composed of synovial fibroblasts which have some phenotypic characteristics with transformed cells. As a pannus grows within the joint it expresses many pro-angiogenic signals, and experiences many of the same neo-angiogenic requirements as a tumor. The need for additional blood supply, neoangiogenesis, is critical. Similarly, many chronic inflammatory conditions also have a proliferative component in which some of the cells composing it may have characteristics usually attributed to transformed cells.

[0675] Another example of a condition involving excess angiogenesis is proliferative diabetic retinopathy (PDR) (Lip et al. Br J Ophthalmology 88: 1543, 2004). PDR possesses angiogenic, inflammatory and proliferative components. It is characterized by neovascularization of the retina and intrusion of vessels into the vitreous cavity, and is accompanied by bleeding and scarring around proliferative channels. Elevated expression of HGF, VEGF, and angiopoietin-2 is commonly detected in the vitreous fluid of patients with PDR. This overexpression is likely required for disease-associated remodeling and branching of blood vessels, which then supports the proliferative component of the disease. VEGF may be important in early stage to increase vascular permeability while HGF functions at a later stage in growth of endothelial cells in neovascularization.

[0676] 3. HGF Isoforms and Cancer and Angiogenesis

[0677] HGF isoforms that antagonize HGF/MET signaling and/or that inhibit angiogenesis can be used in treatments of cancer and angiogenic related vascular disease. Generally, angiogenesis inhibitors are potent inhibitors of tumor growth and metastases by decreasing the density of blood vessels that supply oxygen to the tumor. Metastasis of tumors, however, is also contributed to by hypoxic regions of tumors that are devoid of vessel growth. Such hypoxia leads to upregulation of MET in cancer cells which in turn leads to invasive growth potential of tumors through upregulation of the HGF/MET signaling pathway. Thus, inhibition of HGF/MET signaling offers added advantages of decreasing metastatic growth coupled with anti-angiogenic therapy.

[0678] Provided herein are HGF isoforms that can modulate one or more steps in the tumorogenic and/or angiogenic process. Exemplary steps in the tumor growth and angiogenesis pathway that are targets for HGF isoforms are shown in FIG. 3. HGF isoforms can be administered singly, intermittently, together in single or two or more compositions or in other combinations thereof. Among the isoforms provided are those that compete with HGF for binding to MET and/or other receptors therefore thereby reducing interaction of circulating HGF. Reduction of circulating HGF can mitigate the effects of circulating HGF in cancer development, including inhibiting tumor growth, invasion, and metastasis of tumor cells and its role in angiogenesis. HGF isoforms also can inhibit angiogenesis as it contributes to the metastasis and growth of primary and secondary tumors, as well as other angiogenic diseases.

### N. Exemplary Treatments with HGF Isoforms

[0679] Provided herein are methods of treatment with HGF isoforms for diseases and conditions associated with angiogenesis and/or aberrant activation of MET. HGF isoforms can be used in the treatment of a variety of diseases and conditions, including those described herein. Treatment can be effected by administering, by suitable route, formulations of the polypeptides, which can be provided in compositions as polypeptides and can be linked to targeting agents for targeted delivery, or encapsulated in delivery vehicles, such as liposomes. Alternatively, nucleic acids encoding the polypeptides can be administered as naked nucleic acids or in vectors, particularly gene therapy vectors. Such gene therapy can be effected ex vivo by removing cells from a subject, introducing the vector or nucleic acid into the cells and then reintroducing the modified cells. Gene therapy also can be effected in vivo by directly administering the nucleic acid or vector.

[0680] Treatments using the HGF isoforms provided herein, include, but are not limited to, treatment of diseases and conditions associated with cell proliferation and neovascularization including cancers and angiogenic diseases, including rheumatoid arthritis, diabetic retinopathy, and hemangiomas. Exemplary treatments and preclinical studies are described for treatments and therapies with HGF isoforms. Such descriptions are meant to be exemplary only and are not limited to a particular HGF isoform. One of skill in the art can determine the appropriate dosage of a molecule to administer based on the type of disease to be treated, the severity and course of the disease, whether the molecule is administered for preventive or therapeutic purposes, previous therapy, the patient's clinical history and response to therapy, and the discretion of the attending physician.

[0681] 1. Cancer

[0682] HGF isoforms, including those provided herein, such as, but not limited to, the HGF isoforms (and encoding nucleic acids) set forth in SEQ ID NOS: 9-14 can be used in the treatment of cell proliferation diseases including cancers. HGF signaling contributes to cancer progression by affecting cellular processes such as cell growth, inhibition of apoptosis, cell morphogenesis, cell adhesion, and cell motility that are associated with tumor proliferation and invasion. Examples of cancers to be treated include, but are not limited to, carcinoma, lymphoma, blastoma, sarcoma, and leukemia or lymphoid malignancies. Additional examples of such cancers include squamous cell cancer (e.g. epithelial squamous cell cancer), lung cancer including small-cell lung cancer, non-small-cell lung cancer, adenocarcinoma of the lung and squamous carcinoma of the lung, cancer of the peritoneum, hepatocellular cancer, gastric or stomach cancer including gastrointestinal cancer, pancreatic cancer, glioblastoma, cervical cancer, ovarian cancer, liver cancer, bladder cancer, hepatoma, breast cancer, colon cancer, rectal cancer, colorectal cancer, endometrial or uterine carcinoma, salivary gland carcinoma, kidney or renal cancer, prostate cancer, vulval cancer, thyroid cancer, hepatic carcinoma, anal carcinoma, penile carcinoma, as well as head and neck cancer. Cancers treatable with HGF isoforms are generally cancers expressing the MET receptor. Such cancers can be identified by any means known in the art for detecting MET expression, for example by RT-PCR or by immunohistochemistry.

[0683] Treatment of cancer with HGF isoforms can suppress tumor growth and metastases. For example, an animal model of tumor cell formation can be produced by injecting C6 glioma cells into immunocompromised athymic nude mice. Administration of HGF isoforms, for example once daily, to the immunocompromised mice can decrease tumor volume and decrease cellular proliferation at the tumor site. In another model termed the Lewis lung carcinoma model, whereby distant metastases flourish upon removal of the primary tumor, administration of HGF isoforms just before and just after resection of primary tumors resulting from inoculation with wild-type Lewis lung carcinoma cells results in a decrease in the number of lung surface metastases.

[0684] HGF isoforms can be used to treat cancers that exhibit neovascularization of solid tumors. Tumor angiogenesis is critical to the growth and metastasis of tumors. Highly vascular tumors have an increased risk of developing metastases. HGF isoforms can inhibit blood vessel growth by inhibiting the actions of pro-angiogenic factors, such as FGF and VEGF, in addition to HGF. Therapies for the treatment of cancers with HGF isoforms include administration of predefined doses of HGF isoforms over a period of time to control to the vascularization and growth of the tumor. Exemplary cancers in which HGF isoforms can be used to inhibit tumor angiogenesis include, but are not limited to, carcinomas of the breast colon, gallbladder, stomach, lung, ovary, pancreas, and prostate, lymphomas, and malignant melanomas.

[0685] 2. Angiogenic Diseases

[0686] HGF isoforms, including those provided herein, such as but not limited to, the HGF isoforms (and encoding nucleic acids) set forth in SEQ ID NOS: 9-14 can be used the treatment of diseases associated with aberrant angiogenesis including rheumatoid arthritis, osteoarthritis, psoriasis, Osler-Webber syndrome, endometriosis, Still's disease, angiogenesis of the heart-muscle, peripheral hemangiectasis, hemophilic arthritis, age-related macular degeneration, retinopathy of prematurity, rejection to keratoplasty, systemic lupus erythematosus, atherosclerosis, neovascular glaucoma, choroidal neovascularization, retrolental fibroplasias, perosis, neurofibroma, hemangioma, acoustic neuroma, neurofibroma, trachoma, suppurative granuloma, and diabetes-related diseases, such as proliferative diabetic retinopathy and vascular diseases. Exemplary non-limiting angiogenic diseases contemplated as disease targets for treatment using HGF isoforms are described below.

[0687] a. Arthritis and Chronic Inflammatory Diseases

[0688] HGF isoforms including, but not limited to, HGF isoforms described herein such as polypeptides that contain sequences of amino acids set forth in any of SEQ ID NOS: 10, 12, 14, 18, or 20, can be used in the treatment of inflammatory diseases and conditions, including arthritis, inflammatory lung disease, Crohn's disease, and psoriasis. The inflammatory response is characterized by dilation and increased permeability of the vasculature and activation of endothelial cells, followed by angiogenic remodeling of capillaries and venules. Although stimulation of angiogenic factors can be part of the normal inflammatory response, chronic inflammation is often characterized by significant increases in capillary density and excessive dilation of blood vessels. The inflammatory tissue is often hypoxic, which causes the upregulation of pro-angiogenic factors, such as VEGF, FGF, and HGF. Suppression of angiogenesis can decrease the nutrient supply to inflamed tissues, block the entry of inflammatory cells into the tissue, and prevent the endothelial cell activation and secretion of cytokines and extracellular matrix proteinases.

[0689] In the synovial fluid of patients with rheumatoid arthritis and osteoarthritis, elevated levels of VEGF, FGF, and HGF and other pro-angiogenic factors can be found. In rheumatoid arthritis, the synovial pannus becomes hyperplastic and invades articular cartilage and adjacent bone. A vascular reorganization occurs that results in increased vascular density in the synovium to provide the necessary oxygen and nutrients to the invading pannus. The increased vascular permeability may also increase oedema and joint swelling. In osteoarthritis, vascular reorganization in the synovium also occurs; however, instead of degradation of the bone and cartilage by an invading pannus, chondrocyte hypertrophy and endochondral ossification occurs by direct vascular invasion of the cartilage and increased vascularization at the osteochondral junction. Treatment of rheumatoid arthritis and osteoarthritis with HGF isoforms, including one or more of the isoforms set forth as SEQ ID NOS: 10, 12, 14, 18, or 20, can ameliorate the symptoms associated with these diseases by inhibiting the neovascularization processes that lead to joint damage.

[0690] Chronic fibroproliferative disorders such as inflammatory pulmonary fibrosis exhibit dysregulated angiogenesis and may contribute to fibroplasia and deposition of extracellular matrix. Stimulation of angiogenesis occurs due to the imbalance of pro-angiogenic factors that are upregulated during lung inflammation. Extensive neovascularization is observed in the lungs of patients with widespread interstitial fibrosis. Vascular redistribution may also impair gas exchange through decreased vessel densities in the alveolar walls in favor of vessel formation near the inflamed tissue which diverts blood flow further away from needed airspaces. Treatment of pulmonary inflammation with HGF isoforms, including one or more of the isoforms set forth as SEQ ID NOS: 10, 12, 14, 18, or 20, can aid in preventing unwanted redistribution of the vascular network and decreasing tissue inflammation.

[0691] Vascular dilation and expansion also play a part in the progression of other inflammatory diseases such as psoriasis and Crohn's disease. Poriatic skin is characterized by abnormally proliferating epithelial cells and blood vessels, capillary vessel leakage and overproduction of pro-angiogeneic factors, including VEGF and IL-8. The vasculature beneath psoriatic lesions is abundant and elongated. Skin lesions that show increased expression of VEGF also display abundant VEGF receptor expression in the underlying endothelium. Similarly, increased levels of VEGF are observed in the serum of patients with inflammatory bowel diseases, such as Crohn's disease. Increased vascular permeability may contribute to recruitment of macrophage infiltration and stimulation of immune responses against the injured tissue. Treatment of inflammatory disorders, such as psorisis and Crohn's disease, with HGF isoforms, including one or more of the isoforms set forth as SEQ ID NOS: 10, 12, 14, 18, or 20, can ameliorate the symptoms associated chronic inflammation.

[0692] HGF isoforms also can be used to treat vascular diseases, such as atherosclerosis. Stimulation of angiogenesis can contribute to the formation and growth of atherosclerotic plaques through increased vascular dilation and recruitment of macrophages to the vessel lesions. Increased inflammatory responses at sites of atherosclerotic plaques leads to expansion of the lesion. Treatment with HGF isoforms, including one or more of the isoforms set forth as SEQ ID NOS: 10, 12, 14, 18, or 20, can be used to inhibit plaque growth in atherosclerotic disease.

[0693] b. Ocular Diseases

[0694] HGF isoforms including, but not limited to, HGF isoforms described herein such as polypeptides that contain sequences of amino acids set forth in any of SEQ ID NOS: 10, 12, 14, 18, or 20, can be used in the treatment of ocular diseases and conditions, including age-related macular degeneration and proliferative diabetic retinopathy. Age-related macular degeneration is associated with vision loss resulting from accumulated macular drusen, extracellular deposits in Brusch's membrane, and retinal pigment epithelium (RPE) dysfunction due to degenerative cellular and molecular changes in RPE and photoreceptors overlying the macular drusen. The cellular and molecular changes occurring in the RPE, in part due to oxidative stress in the aging eye, include altered expression of genes for cytokines, matrix organization, cell adhesion, and apoptosis resulting in the possible induction of a focal inflammatory response at the RPE-Bruch's membrane border. For example, oxidative stress induces the accumulation of angiogenic factors, including HGF, in the RPE and photoreceptor layers in early age-related macular degeneration, and induces a variety of inflammatory events including NFκB nuclear localization, and apoptosis. HGF stimulates the division and migration of RPE and blood vessel endothelial cells. HGF also stimulates the production of other growth factors that promote the formation of new blood vessels and supports neovascularization directly by invasion of the blood vessel cells into the extracellular matrix. Treatment of early stage age-related macular generation with HGF isoforms, including one or more of the isoforms set forth as SEQ ID NOS: 10, 12, 14, 18, or 20, can ameliorate one or more symptoms of the disease.

[0695] Proliferative diabetic retinopathy (PDR) is characterized by neovascularization of the retina and intrusion of blood vessels into the vitreous cavity, that leads to bleeding and scarring around proliferative channels. HGF expression is significantly elevated in the vitreous fluid of the eyes of patients with PDR. VEGF expression is also upregulated in PDR and may be important in the early stages to increase vascular permeability, while HGF functions at a later stage in growth and activation of endothelial cells needed for neovascularization. Treatment of PDR with HGF isoforms, including one or more of the isoforms set forth as SEQ ID NOS: 10, 12, 14, 18, or 20, can aid in the inhibition of retinal vessel growth stimulated by HGF and VEGF pathways.

[0696] c. Endometriosis

[0697] HGF isoforms including, but not limited to, HGF isoforms described herein such as polypeptides that contain sequences of amino acids set forth in any of SEQ ID NOS: 10, 12, 14, 18, or 20, can be used in the treatment of endometriosis. Regulated angiogenesis is a normal process that occurs during the female menstrual cycle; however, in endometriosis, the endometrium exhibits excessive angiogenesis, characterized by enhanced endothelial cell proliferation. These endothelial cells have a high expression of the pro-angiogenic αᵥβ₃ integrin. The increased growth mimics some of the characteristics of tumor growth by the formation of nodules or lesions that implant and grow in areas of the peritoneal cavity including the ovaries, fallopian tubes, the ligaments supporting the uterus, the area between the vagina and the rectum, the outer surface of the uterus, and the lining of the pelvic cavity. Growths can also be found in abdominal surgery scars, on the intestines or in the rectum, on the bladder, vagina, cervix, and vulva. Treatment of endometriosis with HGF isoforms, including one or more of the isoforms set forth as SEQ ID NOS: 10, 12, 14, 18, or 20, can aid in the inhibition of excessive endometrial vessel formation and nodule growth.

[0698] 3. Malaria

[0699] HGF isoforms, including, but not limited to, HGF isoforms described herein such as polypeptides that contain sequences of amino acids set forth in any of SEQ ID NOS: 10, 12, 14, 18, or 20, can be used in the treatment of malaria. The causative agent of malaria is Plasmodium which infects hepatocytes to initiate mammalian infection. HGF renders hepatocytes susceptible to infection which is dependent upon signaling of HGF through its receptor MET. MET signaling induced by HGF induces morphogenic rearrangements of the host-cell cytoskeleton that are required for the early development of the parasites within hepatocytes. Infection of hepatocytes by Plasmodium also is contributed to by anti-apoptotic signals induced by HGF-MET signaling. Treatment of malaria with HGF isoforms, including one or more of the isoforms set forth as SEQ ID NOS: 10, 12, 14, 18, or 20 can prevent malaria infection.

[0700] 4. Combination Therapies

[0701] HGF isoforms, including those provided herein, such as but not limited to, the HGF isoforms (and encoding nucleic acids) set forth in SEQ ID NOS: 10, 12, 14, 18, or 20, can be used in combination with each other, and/or in combination with other agents, molecules, and or existing drugs and therapeutics to treat diseases and conditions, particularly those involving cancers and other proliferative disorders and/or aberrant angiogenesis as set forth herein and known to those of skill in the art. For example, an HGF isoform can be administered with an anti-tumor agent that treats cancers including squamous cell cancer (e.g. epithelial squamous cell cancer), lung cancer including small-cell lung cancer, non-small-cell lung cancer, adenocarcinoma of the lung and squamous carcinoma of the lung, cancer of the peritoneum, hepatocellular cancer, gastric or stomach cancer including gastrointestinal cancer, pancreatic cancer, glioblastoma, cervical cancer, ovarian cancer, liver cancer, bladder cancer, hepatoma, breast cancer, colon cancer, rectal cancer, colorectal cancer, endometrial or uterine carcinoma, salivary gland carcinoma, kidney or renal cancer, prostate cancer, vulval cancer, thyroid cancer, hepatic carcinoma, anal carcinoma, penile carcinoma, as well as head and neck cancer, and other cancers where aberrant MET activation is involved.

[0702] Examples of anti-tumor agents include angiogenesis inhibitors, anti-proliferative agents, bone resorption inhibitors, DNA modification/repair agents, DNA synthesis inhibitors, DNA-RNA transcription regulators, enzyme activators, enzyme inhibitors, HSP-90 inhibitors, microtubule inhibitors, and other therapy adjuncts. Exemplary anti-tumor agents that can be used in combination with HGF isoforms include, but are not limited to, angiostatin, DL-α-difluoromethylomithine hydrochloride solid, endostatin, genistein, staurosporine, thalidomide, N-acetyl-D-sphingosine, aloe-emodine, apigenin, berberine chloride form, dichloromethylenediphosphonic acid disodium salt, emodin, N-hexanoyl-D-sphingosine, 7β-hydroxycholesterol, 25-hydroxycholesterol, hyperforin, parthenolide, rapamycin, alendronate sodium trihydrate, etidronate disodium solid, pamidronate disodium salt, aphidicolin, bleomycin sulfate, carboplatin, carmustine, chlorambucil, cyclophosphamide monohydrate, dacarbazine, cis-diammineplatimun(II)dichloride crystalline, 6,7-dihydroxycourmain, melphalan powder, methoxyamine hydrochloride, mitomycin C, mitoxantrone dihydrochloride, oxaliplatin solid, amethopterin, cytosine β-D-arabinofuranoside, 5-fluoro-5′-deoxyuridine, ganciclovir, hydroxyurea, 6-mecaptopurine monohydrate, Daunorubicin hydrochloride, (−)-Deguelin, formestane, Fostriecin, indomethacin, oxamflatin, tryphostin AG, urinary trypsin inhibitor, cholecalciferol, melatonin, raloxifene hydrochloride, tamoxifen, troglitazone, and/or geldanamycin.

[0703] An HGF isoform can be administered in combination with other agents that inhibit MET activation. For example, an HGF isoform can be administered with other antagonist or neutralizing agents of a MET receptor such as for example an anti-HGF antibody, an uncleavable pro-HGF, a recombinant Sema domain of MET, and/or a soluble MET isoform. Exemplary soluble MET isoforms can include any one of the MET isoforms set forth in SEQ ID NOS:84-114. An HGF isoform also can be administered in combination with agents that prevent MET dimerization and signaling such as a dominant-negative receptor, anti-MET Sema antibodies, ATP competitors, SH2 competitors, inhibitors of specific transducers such as for example PtdIns3K, MAPK, or STAT3 inhibitors, and/or antisense, ribozyme, RNAi or other molecules that silence MET expression.

[0704] Combinations of HGF isoforms with intron fusion proteins and other agents, including cell surface receptor (CSR) polypeptide isoforms for treating cancers and other disorders involving aberrant angiogenesis are contemplated (see, e.g. those described herein and in copending and published applications U.S. application Ser. Nos. 09/942,959, 09/234,208, 09/506,079; U.S. Provisional Application Ser. Nos. 60/571,289, 60/580,990 and 60/666,825; and U.S. Pat. No. 6,414,130, published International PCT application No. WO 00/44403, WO 01/61356, WO 2005/016966). The cell surface receptor isoforms can include MET isoforms or other cell surface receptor isoforms including isoforms of receptor tyrosine kinases or tumor necrosis factor receptors, such as members of the VEGFR, FGFR, PDGFR, MET, TIE, Eph, RAGE, and TNFR families. These can include isoforms of CSRs including ErbB2 (HER2), ErbB3, ErbB4, DDR1, DDR2, EphA1, EphA2, EphA3, EphA4, EphA5, EphA6, EphA7, EphA8, EphB1, EphB2, EphB3, EphB4, EphB5, EphB6, FGFR-1, FGFR-2, FGFR-3, FGFR-4, PDGFR-B, TEK, Tie-1, KIT, VEGFR-1, VEGFR-2, VEGFR-3, Flt1, Flt3, TNFR1, TNFR2, RON, CSF1R, and RAGE. Exemplary of such isoforms are the herstatins (see, SEQ ID NOS: 186-200), and polypeptides that include the intron portion of a herstatin (see, SEQ ID NOS: 216-230), as well as isoforms and encoding nucleotide sequences set forth in any of SEQ ID NOS:36-185. The combinations of isoforms and/or drug agent and HGF isoform selected is a function of the disease to be treated and is based upon consideration of the target tissues and cells and receptors expressed thereon.

[0705] The combinations can target two or more cell surface receptors or steps involved in cancer cell proliferation, growth, invasion, and metastasis, and/or steps involved in angiogenic and/or endothelial cell maintenance pathways or can target two or more cell surface receptors or steps in a disease process, such as any in which one or both of these pathways are implicated, such as angiogenic diseases including diabetes, cancers and all other noted herein and known to those of skill in the art. The two or more agents can be administered as a single composition or can be administered as two or more compositions (where there are more than two agents) simultaneously, intermittently or sequentially. They can be packaged as a kit that contains two or more compositions separately or as a combined composition and optionally with instructions for administration and/or devices for administration, such as syringes.

[0706] 5. Evaluation of HGF Isoform Activities

[0707] If needed animal models can be used to evaluate HGF isoforms that are candidate therapeutics. Parameters that can be assessed include, but are not limited to, efficacy and concentration-response, safety, pharmacokinetics, interspecies scaling and tissue distribution. Model animal studies include assays such as described herein as well as those known to one of skill in the art. Animal models can be used to obtain data that then can be extrapolated to human dosages for design of clinical trials and treatments with HGF isoforms, for example, efficacy and concentration-response can be extrapolated from animal model results.

### O. EXAMPLE

[0708] The following example is included for illustrative purposes only and are not intended to limit the scope of the invention.

### Example

### Cloning HGF Isoforms

A. Preparation of Messenger RNA

[0709] mRNA isolated from major human tissue types from healthy or diseased tissues or cell lines were purchased from Clontech (BD Biosciences, Clontech, Palo Alto, Calif.) and Stratagene (La Jolla, Calif.). Equal amounts of mRNA were pooled and used as templates for reverse transcription-based PCR amplification (RT-PCR).

B. cDNA Synthesis

[0710] mRNA was denatured at 70° C. in the presence of 40% DMSO for 10 min and quenched on ice. First-strand cDNA was synthesized with either 200 ng oligo(dT) or 20 ng random hexamers in a 20 μl reaction containing 10% DMSO, 50 mM Tris-HCl (pH 8.3), 75 mM KCl, 3 mM MgCl₂, 10 mM DTT, 2 mM each dNTP, 5 μg mRNA, and 200 units of Stratascript reverse transcriptase (Stratagene, La Jolla, Calif.). After incubation at 37° C. for 1 h, the cDNA from both reactions were pooled and treated with 10 units of RNase H (Promega, Madison, Wis.).

C. PCR Amplification

[0711] Forward and reverse primers for RT-PCR cloning were designed to clone splice variants of HGF. Forward primers (F1, F2) were selected flanking the start codon and reverse primers (intron11R1, intron11R2, or intron13R1) were selected from the intron sequence of the HGF genomic sequence (Table 6) using the method described by Hiller et al (Genome Biology 2005. 6: R58)(see Table 7). Each PCR reaction contained 10 ng of reverse-transcribed cDNA, 0.2 μM F1/R1 primer mix, 1 mM Mg(OAc)₂, 0.2 mM dNTP (Amersham, Piscataway, N.J.), 1×XL-Buffer, and 0.04 U/μl rTth DNA polymerase (Applied Biosystems) in a total volume of 70 μl. PCR conditions were 36 cycles of 94° C. for 45 sec, 60° C. for 1 min, and 68° C. for 2 min. The reaction was terminated with an elongation step of 68° C. for 20 min. Nested PCR was performed with 1 μp of RT-PCR product from above, F2/R2 primer mix, 1 mM Mg(OAc)₂, 0.2 mM dNTP, 1×XL-Buffer, and 0.04 U/μl rTth DNA polymerase (Applied Biosystems) in a total volume of 70 ul. PCR conditions were 33 cycles of 94° C. for 45 sec, 60° C. for 1 min, and 68° C. for 2 min. The reaction was terminated with an elongation step of 68° C. for 20 min.

TABLE 6
NUCLEIC ACID FOR CLONING HGF ISOFORMS

| | Genomic | | nt | | SEQ | | amino acid | SEQ |
|---|---|---|---|---|---|---|---|---|
| Member | SEQ ID NO: | nt ACC. # | length | CDS | ID NO: | prt ACC. # | length | ID NO: |
| HGF | 1 | NM_000601 | 2820 | 166-2352 | 2 | NP_000592 | 728 | 3 |

[0712] TABLE 7

PRIMERS FOR PCR CLONING

SEQ
ID

| | | |
|---|---|---|
| NO | Primer | Sequence |

| | | |
|---|---|---|
| 4 | HGF_F1 | AGG ATT CTT TCA CCC AGG CA |
| 5 | HGF_intron11R1 | GAA TAA ATG CCA GAC CAC CTA |
| 6 | HGF_F2 | ACC ATG TGG GTG ACC AAA CT |
| 7 | HGF_intron11R2 | TCA CAA GAC ACC AAT CCC TAA CT |
| 8 | HGF_intron13R1 | TCC ATA TTT CTG GGA ATA GGA GGA |
| | | C |

D. Cloning and Sequencing of PCR Products

[0713] PCR products were electrophoresed on a 0.8% agarose gel, and DNA from detectable bands were stained with Gelstar (BioWhitaker Molecular Application, Walkersville, Md.). The DNA bands were extracted with the QiaQuick gel extraction kit (Qiagen, Valencia, Calif.), ligated into the pDrive UA-cloning vector (Qiagen), and transformed into DH10B cells (Invitrogen, Carlsbad, Calif.). Recombinant plasmids were selected on LB agar plates containing 25 μg/ml kanamycin, 0.1 mM IPTG, and 60 μg/ml X-gal. For each transfection, 12 colonies were randomly picked and their cDNA insert sizes were determined by PCR with UA vector primers. Clones were then sequenced from both directions with M13 forward and reverse vector primers. All clones were sequenced entirely using custom primers for directed sequencing completion across gapped regions.

E. Sequence Analysis

[0714] Computational analysis of alternative splicing was performed by alignment of each cDNA sequence to its respective genomic sequence using SIM4 (a computer program for analysis of splice variants). Only transcripts with canonical (e.g. GT-AG) donor-acceptor splicing sites were considered for analysis. Clones encoding HGF isoforms were studied further (see below, Table 8).

F. Exemplary HGF Isoforms

[0715] Exemplary nucleic acid molecules encoding HGF isoforms, prepared using the methods described herein, are set forth below in Table 8. Nucleic acid molecules encoding HGF isoforms are provided and sequences thereof are set forth in SEQ ID NOS: 9, 11, 13, 17, or 19. The sequence of polypeptides of exemplary HGF isoforms are set forth in SEQ ID NOS: 10, 12, 14, 18, or 20.

TABLE 8
Nucleic acid molecules encoding HGF Isoforms

| | | | Amino Acid | SEQ ID |
|---|---|---|---|---|
| Gene | ID | Type | Length | NOS |
| HGF | SR023A02 | Intron fusion | 467 | 10, 18 |
| HGF | SR023A08 | Intron fusion | 472 | 12, 20 |
| HGF | SR023E09 | Intron fusion | 514 | 14 |

[0716] Since modifications will be apparent to those of skill in this art, it is intended that this invention be limited only by the scope of the appended claims.

1. An isolated HGF polypeptide isoform, comprising all or a portion of a K4 domain of an HGF ligand, wherein the HGF polypeptide isoform is an intron fusion protein.

2. The isolated HGF polypeptide isoform of claim 1, wherein the HGF polypeptide is encoded by a sequence of nucleotides that includes all or a portion of an intron selected from among introns 1, 2, 3, 4, 5, 6, 7, 8, 9, 10, 11, 12, 13, 14, 15, 16, and 17 of a cognate HGF gene.

3. The isolated HGF polypeptide isoform of claim 1, wherein the sequence of the cognate HGF gene is set forth in SEQ ID NO:1, or is an allelic or species variant thereof.

4. The isolated HGF polypeptide of claim 3, wherein the HGF polypeptide has at least 80%, 85%, 90%, 95%, 96%, 97%, 98% or 99% sequence identity along its full length with a sequence of amino acids encoded by the corresponding portions of SEQ ID NO: 1.

5. The isolated HGF polypeptide of claim 3, wherein the cognate HGF polypeptide has at least 80%, 85%, 90%, 95%, 96%, 97%, 98% or 99%. sequence identity with the sequence of amino acids encoded by SEQ ID NO: 1.

6. The isolated HGF polypeptide isoform of claim 1, further comprising all or part of a N-terminal domain, all or part of a K1 domain, all or part of a K2 domain, or all or part of a K3 domain or combinations thereof.

7. The isolated HGF polypeptide isoform of claim 2, wherein the intron is all or a portion of intron 11.

8. The isolated HGF polypeptide isoform of claim 1, wherein the polypeptide is operatively linked to at least one amino acid encoded by intron 11.

9. The isolated HGF polypeptide isoform of claim 8, wherein the polypeptide comprises three amino acids encoded by intron 11.

10. The isolated HGF polypeptide isoform of claim 9, wherein the HGF polypeptide has at least 80%, 85%, 90%, 95%, 96%, 97%, 98% or 99% sequence identity with a sequence of amino acids set forth in any of SEQ ID NOS: 10, 12, 18, or 20.

11. The isolated HGF polypeptide isoform of claim 9 that comprises the sequence of amino acid set forth in any of SEQ ID NOS: 10, 12, 18, or 20, or is an allelic variant thereof.

12. The isolated HGF polypeptide isoform of claim 11, wherein the allelic variant comprises one or more amino acids of the allelic variations as set forth in SEQ ID NO: 16.

13. The isolated HGF polypeptide isoform of claim 1, further comprising all or part of a SerP domain.

14. The isolated HGF polypeptide of claim 13, wherein the intron is all or part of intron 13.

15. The isolated HGF polypeptide isoform of claim 14, wherein the HGF polypeptide has at least 80%, 85%, 90%, 95%, 96%, 97%, 98% or 99% sequence identity with a sequence of amino acids set forth in SEQ ID NO: 14.

16. The isolated HGF polypeptide isoform of claim 14 that comprises the sequence of amino acid set forth in SEQ ID NO: 14, or is an allelic or species variant thereof.

17. The isolated HGF polypeptide isoform of claim 16, wherein the variant comprises one or more amino acids of the allelic variations as set forth in SEQ ID NO: 16.

18. The isolated HGF polypeptide isoform of claim 15, wherein the polypeptide contains the same number of amino acids as the polypeptide set forth in SEQ ID NO: 14.

19. The isolated HGF polypeptide isoform of claim 1 that is an antagonist of a cognate HGF polypeptide.

20. The isolated HGF polypeptide isoform of claim 19, wherein the polypeptide binds to a MET receptor.

21. The isolated HGF polypeptide isoform of claim 20, wherein the polypeptide inhibits a MET-mediated activity selected from among one or more of mitogenesis, morphogenesis, and motogenesis.

22. The isolated HGF polypeptide isoform of claim 1 that inhibits angiogenesis.

23. The isolated HGF polypeptide isoform claim 22, wherein the polypeptide binds to a glycosaminoglycan.

24. The isolated HGF polypeptide isoform of claim 23, wherein the glycosaminoglycan is heparin sulfate.

25. The isolated HGF polypeptide isoform of claim 22, wherein the polypeptide binds to an angiogenic molecule.

26. The isolated HGF polypeptide isoform of claim 25, wherein the angiogenic molecule is selected from among ATP synthase, angiomotin, αvβ3 integrin, annexin II, MET, VEGFR, and FGFR.

27. The isolated HGF polypeptide isoform of claim 22 that inhibits angiogenesis induced by a cognate HGF, FGF-2, or VEGF.

28. The isolated HGF polypeptide isoform of claim 1 that is an HGF antagonistic and inhibits angiogenesis.

29. A pharmaceutical composition, comprising an HGF polypeptide isoform of claim 1.

30. The composition of claim 29, comprising an amount of the polypeptide effective for antagonizing a cognate HGF polypeptide.

31. The composition of claim 30, wherein antagonizing a cognate HGF inhibits one or more of a MET-mediated activity selected from among any one or more of mitogenesis, motogenesis and morphogenesis.

32. The composition of claim 29, comprising an amount of the polypeptide effective for inhibiting angiogenesis.

33. The composition of claim 32, wherein the polypeptide inhibits angiogenesis induced by a cognate HGF, FGF-2, or VEGF.

34. The composition of claim 29, further comprising an anti-cancer agent and/or an anti-angiogenesis agent.

35. A nucleic acid molecule encoding an HGF polypeptide of claim 1.

36. A nucleic acid molecule, comprising at least all or part of one intron and an exon of an HGF gene, but not containing intron 5.

37. A nucleic acid molecule of claim 36, wherein:
the intron contained in the molecule contains a stop codon;
the nucleic acid molecule encodes an open reading frame that spans an exon intron junction; and
the open reading frame terminates at the stop codon in the intron.

38. The nucleic acid molecule of claim 37, wherein the intron encodes one or more amino acids of the encoded polypeptide.

39. The nucleic acid molecule of claim 38, wherein the intron is all or a portion of intron 11.

40. The nucleic acid molecule of claim 39, comprising a sequence of nucleotides set forth in any one of SEQ ID NOS: 9, 11, 17 and 19, or an allelic or species variant thereof.

41. The nucleic acid molecule of claim 40, wherein the allelic variant is any one of the allelic variations set forth in SEQ ID NO:15.

42. The nucleic acid molecule of claim 37, wherein the stop codon is the first codon in the intron.

43. The nucleic acid molecule of claim 42, wherein the intron is all or a portion of intron 13.

44. The nucleic acid molecule of claim 43, comprising a sequence of nucleotides set forth in SEQ ID NO: 13 or an allelic variant thereof.

45. The nucleic acid molecule of claim 44, wherein the allelic variant is any one of the allelic variations set forth in SEQ ID NO:15.

46. A nucleic acid molecule, wherein the nucleic acid molecule is selected from among:
a) a nucleic acid molecule comprising a sequence of nucleotides set forth in any of SEQ ID NOS: 9, 11, 13, 17, 19, and allelic variants or species thereof;
b) a nucleic acid molecule that encodes a polypeptide of claim 1 and has at least 60%, 65%, 70%, 75%, 80%, 85%, 90%, 91%, 92%, 93%, 94%, 95%, 96%, 97%, 98% or 99% sequence identity to any of SEQ ID NOS: 9, 11, 13, 17, or 19;
c) a nucleic acid that hybridizes under conditions of medium or high stringency along at least 70% of its full length to a nucleic acid molecule comprising a sequence of nucleotides set forth in any of SEQ ID NOS: 9, 11, 13, 17, or 19 wherein the encoded polypeptide contains a K4 domain and contains at least one codon from an intron;
d) a nucleic acid molecule that comprises degenerate codons of a), b), or c); and
e) a nucleic acid molecule that is a splice variant of an HGF gene wherein the nucleic acid molecule includes all or a portion of an intron other than intron 5.

47. A polypeptide encoded by a nucleic acid molecule of claim 35.

48. A vector, comprising the nucleic acid molecule of claim 35.

49. The vector of claim 48 that is a mammalian expression vector.

50. The vector of claim 48 that is selected from among an adenovirus vector, an adeno-associated virus vector, EBV, SV40, a cytomegalovirus vector, a vaccinia virus vector, a herpesvirus vector, a retrovirus vector, a lentivirus vector and an artificial chromosome.

51. The vector of claim 50 that is episomal or that integrates into a chromosome of a cell into which it is introduced.

52. A cell, comprising the vector of claim 48.

53. A method of treatment of an HGF-mediate disease, comprising administering to a subject a nucleic acid molecule of claim 35.

54. The method of treatment of claim 53, wherein the nucleic acid molecule is introduced into a vector for administration.

55. The method of treatment of claim 54, wherein the vector is an expression vector.

56. The method of treatment of claim 55, wherein the vector is episomal.

57. The method of treatment of claim 55, wherein the expression vector is selected from among an adenovirus vector, an adeno-associated virus vector, EBV, SV40, a cytomegalovirus vector, a vaccinia virus vector, a herpesvirus vector, a retrovirus vector, a lentivirus vector, or an artificial chromosome.

58. The method of treatment of claim 53, wherein the nucleic acid is administered in vivo or ex vivo.

59. The method of treatment of claim 58, wherein ex vivo treatment comprises administering the nucleic acid into a cell in vitro, followed by administration of the cell into the subject.

60. The method of treatment of claim 59, wherein the cell is from a suitable donor or from the subject to be treated.

61. The method of treatment of claim 53, wherein the subject is a human.

62. A pharmaceutical composition, comprising a nucleic acid molecule of claim 35.

63. A method of treating an HGF-mediate disease or condition, comprising, administering a pharmaceutical composition of claim 29.

64. The method of claim 63, wherein the pharmaceutical composition contains a polypeptide that inhibits angiogenesis, cell proliferation, cell migration, tumor cell growth or tumor cell metastasis.

65. The method of claim 63, wherein the disease or condition is selected from the group consisting of cancer, angiogenic disease, or malaria.

66. The method of claim 65, wherein the angiogenic disease is selected from among ocular disease, endometriosis, arthritis, or other chronic inflammatory diseases.

67. The method of claim 66, wherein the angiogenic disease is selected from among rheumatoid arthritis, osteoarthritis, psoriasis, Osler-Webber syndrome, endometriosis, Still's disease, angiogenesis of the heart-muscle, peripheral hemangiectasis, hemophilic arthritis, age-related macular degeneration, retinopathy of prematurity, rejection to keratoplasty, systemic lupus erythematosus, atherosclerosis, neovascular glaucoma, choroidal neovascularization, retrolental fibroplasias, perosis, neurofibroma, hemangioma, acoustic neuroma, neurofibroma, trachoma, suppurative granuloma, and diabetes-related diseases, such as proliferative diabetic retinopathy and vascular diseases, inflammatory lung disease, Crohn's disease, and psoriasis.

68. The method of claim 66, wherein the cancer is selected from the group consisting of carcinoma, lymphoma, blastoma, sarcoma, and leukemia or lymphoid malignancies, squamous cell cancer, lung cancer, small-cell lung cancer, non-small-cell lung cancer, adenocarcinoma of the lung, squamous carcinoma of the lung, cancer of the peritoneum, hepatocellular cancer, gastric or stomach cancer, gastrointestinal cancer, pancreatic cancer, glioblastoma, cervical cancer, ovarian cancer, liver cancer, bladder cancer, hepatoma, breast cancer, colon cancer, rectal cancer, colorectal cancer, endometrial or uterine carcinoma, salivary gland carcinoma, kidney or renal cancer, prostate cancer, vulval cancer, thyroid cancer, hepatic carcinoma, anal carcinoma, penile carcinoma, as well as head and neck cancer.

69. A conjugate, comprising an HGF isoform of claim 1.

70. The conjugate of claim 69, wherein:
the conjugate comprises an HGF isoform or domain thereof or functional portion thereof, and a second portion from a different HGF isoform or from another cell surface receptor (CSR) isoform; and
the portions are linked directly or via a linker.

71. The conjugate of claim 70, wherein the second portion from a cell surface receptor isoform is all or part of an extracellular domain of the cell surface receptor isoform.

72. The conjugate of claim 70, wherein the cell surface receptor isoform is a receptor tyrosine kinase.

73. The conjugate of claim 70, wherein the second portion is all or part of a herstatin polypeptide.

74. The conjugate of claim 73, wherein the herstatin polypeptide comprises a sequence of amino acids set forth in any one of SEQ ID NOS:186-200.

75. A chimeric polypeptide, comprising:
all of or at least one domain of an HGF isoform of claim 1; and
all of or at least one domain of a different HGF isoform or of another cell surface receptor isoform.

76. The polypeptide of claim 75, wherein the cell surface receptor isoform is an intron fusion protein.

77. The polypeptide of claim 76, comprising all of or at least one domain of an HGF isoform and an intron-encoded portion of a cell surface receptor isoform.

78. A combination, comprising:
one or more HGF isoform(s) of claim 1;
one or more other cell surface receptor isoforms; and/or
a therapeutic drug.

79. The combination of claim 78, wherein the isoforms and/or drugs are in separate compositions or in a single composition.

80. The combination of claim 78, wherein the cell surface receptor isoform is an isoform of a VEGFR, FGFR, DDR, TNFR, PDGFR, MET, TIE, RAGE, EPH, or HER.

81. The combination of claim 80, wherein the cell surface receptor isoform is a MET isoform.

82. The combination of claim 78, wherein the isoform is an intron fusion protein.

83. The combination of claim 81, wherein the MET isoform comprises a sequence of amino acids selected from any one of SEQ ID NOS: 85, 87, 89, 91, 93, 95, 97, 99, 101, 103, 105, 107, 109, 111, 113, and 114.

84. A method of treatment of an HGF-mediated disease, comprising administering the components of the combination of claim 78, wherein each component is administered separately, simultaneously, intermittently, in a single composition or combinations thereof.

85. A method of inhibiting tumor invasion or metastasis of a tumor, comprising administering a composition of claim 29.

86. A method of inhibiting angiogenesis, comprising administering a composition of claim 29.

87. A fusion protein or conjugate, comprising a fragment of a CD45 polypeptide linked directly or via a linker to a protein, wherein;
the fragment of CD45 is selected to add carbohydrates or glycosylation sites.

88. The fusion protein of claim 87, wherein the protein is a therapeutic protein.

89. The fusion protein of claim 87, wherein the fusion protein is a cell surface receptor (CSR) or ligand isoform or is a cytokine or CSR or ligand or growth factor or hormone or forms thereof that include additional amino acids on the end.

90. The fusion protein of claim 87, wherein the CD45 polypeptide comprises a sufficient number of glycosylation sites or carbohydrates, whereby serum half-life of the protein is increased by 1%, 5%, 10%, 20%, 30%, 40%, 50%, 60%, 70%, 80%, 90%, 95%, 96%, 97%, 98%, 99% or more.

91. The fusion protein or conjugate of claim 87, wherein the linkage is a chemical linkage optionally including a chemical linker.

92. The fusion protein or conjugate of claim 91, wherein the linker is produced from a heterobifunctional linker and/or is a photocleavable linker.

93. The fusion protein or conjugate of claim 87 that is a fusion protein that optionally also includes a polypeptide or peptide or amino acid linker.

94. The fusion protein or conjugate of claim 93, wherein the linker contains 1-30, 1-10, 2-10 or 2-15 amino acid residues.

95. The fusion protein or conjugate of claim 87, wherein the CD45 polypeptide or fragment thereof comprises the sequence of amino acids set forth in any of SEQ ID NOS: 272, 274, 275, 276, 277, 278, 279, 281, 283, 285, 287, 289, 291, 293, and 295, and fragments thereof and variants thereof.

96. The fusion protein or conjugate of claim 87, wherein the protein is a ligand or CSR isoform or a form thereof containing additional amino acids.

97. The fusion protein or conjugate of claim 96, wherein the protein comprises a sequence of amino acids set forth in any of SEQ ID NOS: 3, 10, 12, 14, 16, 18, 20, 22, 24, 26, 28, 30, 32, 34, 35, 37, 39, 40, 42, 44, 46, 47, 49, 50, 52, 54, 56, 58, 59, 60, 61, 62, 63, 64, 65, 67, 69, 71, 73, 75, 77, 78, 80, 82, 83, 85, 87, 89, 91, 93, 95, 97, 99, 101, 103, 105, 107, 109, 111, 113, 114, 116, 118, 120, 122, 124, 126, 127, 128, 130, 132, 134, 136, 138, 140, 142, 144, 145, 146, 147, 148, 150, 152, 154, 156, 158, 160, 161, 162, 163, 164, 165, 166, 167, 169, 171, 172, 173, 174, 175, 176, 177, 179, 181, 183, 185, 186, 187, 188, 189, 190, 191, 192, 193, 194, 195, 196, 197, 198, 199, 200, 216, 217, 218, 219, 220, 221, 222, 223, 224, 225, 226, 227, 228, 229, 230, 246, 247, 248, 249, 250, 251, and allelic variants thereof.

98. The fusion protein or conjugate of claim 97, wherein the protein is HGF or an isoform thereof.

99. A kit, comprising:
a combination of claim 78; and optionally
one or more of instructions for use of the combination and instructions for use thereof.

100. The isolated HGF polypeptide isoform of claim 2, further comprising all or part of a SerP domain.

101. A polypeptide encoded by a nucleic acid molecule of claim 36.

102. A polypeptide encoded by a nucleic acid molecule of claim 46.

103. A pharmaceutical composition, comprising a vector of claim 48.

104. A method of treating an HGF-mediate disease or condition, comprising, administering a pharmaceutical composition of claim 62.

105. The method of claim 104, that results in inhibition of tumor invasion or metastasis of a tumor or angiogenesis.

106. The isolated HGF polypeptide isoform of claim 9, wherein the polypeptide contains the same number of amino acids as set forth in any of SEQ ID NOS: 10, 12, 18, or 20.

The application's sequence listing, which the Patent Office published only in electronic form, follows.

SEQUENCE LISTING (313 sequences)

SEQ ID NO: 1 - DNA, 68009 bp, Homo sapiens
  HGF genomic
gggagttcagacctagatctttccagttaatcacacaacaaacttagctcatcgcaataaaaagcagctcagagccgactggctcttttaggcactgactccgaacaggattctttcacccaggcatctcctccagagggatccgccagcccgtccagcagcaccatgtgggtgaccaaactcctgccagccctgctgctgcagcatgtcctcctgcatctcctcctgctccccatcgccatcccctatgcaggttagttcccttcttcttcttcattattagtattagtatttaactctcctgctaaccttccctattccttttaacaccctctttttaccctattcccagcatcctttctgaactcagtatgtagtataggtttctaaaagctctcattatgctttttttgacattcttttttgttgttgtttgaatagcatttaaaatgataattaactttccctcaactcccctccacctccaacccaagccccgtcccacttagcctaatagttgtggattatgagatagggaggaagtgctaatactggctgaacttggctgctttggacaagtttaaagctaaagagagggtctggtctgaagaggcaagagtgatggtcagtccggcaggaagtcatccttttccagagaacaatttttcatgataatgcactactccacatcacctagtcaacatttggagccaaattacgactttgtacaggttttcattttgaggaggcagaataaactctgagtatttgcatatcataaaaatgaaagagaaagcctctttttaaagatcttattctttctgggtacggatgcctgccctttgaaactgcagtgcacggagactttgattaaagctgcagaactgcccatctctgtctcccactttctcccttggatttgccgtttggggaggagttgcttgaaagttcatattgcttggagatttagagatctcgtttgctgctctgggaagtttctcttgttatcagggcaagaggaaacatctgtattttgttgtatcattgtagaggctgaggtgccaacgggagaaggcagtgaatatcaagggtaggcgcaggggaataaaagagtgggaacaaatgcccagatggagacatggcctttttacaatataaaaaagagaactggctgtatcttttgagatggtaaatatgacatttatcagacctttgatctagtttttgatatggtacaagggttaaaaaactcaagaattttctaaatgcaaaggaaaatcattcaacccacctggttttcttttattttgtgaagtggcccgtttggaaaatgacactgtttggaaagggtcactctgaaagcatttaggtaagatttctgaagaagtgaaaaagcagtgagttcaaatcaagcaggttatcatgcttgacatgtgtcatgttaaaatcgcttcacagggtcgggtgcggtggctcacgcctgtaatcccagcactttgggaggccgaggcgggcagatcacgaggtcaggagattgagaccatcctagctaacaaggtgaaaccctgtctctactaaaaatacaaaaaattagccaggcgtggtggcaggcacctgtagtcccacctacttgggaggctgaggcaggagactctcttgaacctgggaggtgggggttgcagtgagccgagattgtgtcaccgcacttcagcctggggaacggagcaagactccatctcaagaagaagaagaaaaaaatgcttcacagatgactgctggtttaggggattttgagcttaaattgaaataatggctaatattttgagggttttcatttttaaagattaaaatgtcactgttcttaagtagaatctggttacctgaattcatctgtgctaacgcaaggggaacgcagtgtggaaaacccaaacagtagatcaaccgtaggcagtgtctatttgttttcggcatgcattatgaacttttggcaggagacatacatttgtaattatatttcactttgcctaatgtagaaatgactgtgtttcctgagtacaggcagaatgcagcccaagagtgctggcaggcaaggagagtccagttgggaattacaaatatgctgtgaataattcctgaagtggataattctaaaattgtcatcaaaggagggtgcgcctttgtttagatggccagtttgatagttttttttaataacctttaaaataaaaaatatgggtagcctcttagaacacacaaagtttgttcttttttaaatgacatttaatattgactatttagaggtttcttttgttgttactagctttgattataattatttattctatgaatttatatttgtatgtattgtaaaataacacattgttaggaaagaagtatatactgtaagttgacaaccagttatcaacagaatacactatggagatacttttttaaaagcttaagaaatattcaatataatgggcccccgccatctttgtaggagttagcctatatagaattaccctctattcactcccacctacatgggaaacaaatatccaatcctctgtaataaaagaagcattaaatgagcacctaatattcaagagtatgtgggggatgtaaagatgaacaaataagaaaggaacttaaatttgttgagcaactgatatgaaccaagtagtaaagtacatctcacttaattctaataagattggcactattggactcatttagccggttcaaagacctcagttatcttatttctttgtgagttaagggacagagctgagatttctacccaaatgtatgtgaatgaactatgtggtgttttttttttttcttttttcatttatattgaagcgagcagcagtgaaatcaactgaaatttacttaaaaaaaatcatttggccaagtgatatattttcaaaaaaccctgttagaaatactttgtactatggttgagagttcattttcagcatagagaatcaaaccaggtgaaggggttatatggtactgaagtccatatgaaaagatggatggtagaatagtcagtatcttagcacaggatcacaagtggcccaaggtacagaggttcgtaagtataaggaatgtcccaggaaggaccccacacagcaactgaaggcaagcatttgaggcagaagtattgggcatgtgatggggaatattgtctgtgagtggaaaagtaagatgaggtagaatggataggattgaaggtcatgctcaaccatgtggtctttaaaatgaatgtcatgcgagcagctgaaagtttttttgttgaaaatgtacttgattgaagttgttcttcagtgtggttgcttcagttcctgtgtggaaggaaagttgtaggcagaaacagacagtgaaggtggaggccaggatgaggcttctagaagaatgaaaccttaaataagaactggaaaggagaaggaagaaaatacctagggaggcccctcaaatcacactgaacatcacttcattttgtaaatccccttggaagagatgatgctgcagcttctcaaatatcagcatttgatttacatctgacacagtctctgtcttcttggtatctttatttgtgatattgttgccttctctaaagaaagggagatgactgccgatttgcaaaaatccatgtcttagataataacaacgaaaatttagacttctatttgaaattcttggctttggagagtttacaatctccagtctcaaccattcccttccattaattatttgtgtactttcatcttaacatcttgccacttgaatctcttcatcactaatcatgtggataggtttctcagaatatgtggagccagattcctgcttctttccacaccctgcaaatcctttccttgcatgattttcctttgaagtcaatggttagtccacacagagaagaaaatatatgaggtactgagagaaatgagtgtgaggtgccgggaccagagggagaaatgtgtctttcttcaagcaccttgatacatttgaccctactttctgtgtgtaggttttcactaggatcctaatgatttcagctctaaaacagggacttcaggttcttcaggaaatatagcttccagaatgttttcccatactgggagaagaggaaaaaggagttgtaatttaaagcacaggaaagcatgacaaatttgtagtgatctctcaccctttgatttcatttcaatattttgtttataaacttcagctaacagtcacgcacaaaaaatagtagggaaaaatctgatccaaagatatttttgagtttcttcccaaattaagcttggcttttaactgttttcagtaaaacaagcatcagttgttaatacatatggaggagaaagttgaaactattttcagcaaaggaattttattttcagatgctgtttttgaatgacttctgttttgaatttttcttttattgtataaggaattaattttatagatgtgtggattacatgatgtacaattagctccaacttcatatttttgagtaattagttactggcttagtataaatgacttaattaaaagggaaagtttctatgtcatgagaacaaaatagtgagaagagaattctggtgtctggttctgattgcccctgatagctttgtagccccagacaagcttttcatttctatttgttatctagtaaagggaaataatagatttatttgtttttcaaaatgcttttcgatctttagatgaaaggtagtgattggaaaatttgtcagcaagcaagggtagactgtttttgtgaggtacaacaaaacattaacacatttcagtaggacaattgaggagatttagaattaaatacaatcaaaaattccacggagacctctgctctccagaatcttcttcatggcttgccttcattttgcgtggcattgagaaaagaaaccagagcattgaccagagattttgtttcatttgatacattaaaatacattacacatttaatatttgtcttagactttttgatttttaggcttttccctcacacttagacatgtatactaaatagattatatatcaggccaacttcaattttatatttttagttaatataattatacacatatttaagaaatacgtgtataaaactcttctattttggtgaatagttgtttcatagatttttttcatcaattaactatcatttatttctaagaaacattcaaatttatacaggaaattataaaactattatgctatgaagcatttcaaagcaccttagaaatagtgtaataaggtcaaaggaaagagaaactcttaatggaaaaacttatctcctattaacatggttctgtgacagaaatcaaaatttgaaatgaattatgccttctttgcttggaagaatcacagtttcttcttcatgccagagattaaaggataaaatttcaaaaacaaaactaaaactttgcgtatttataacatttttaaaaatccaaattgattttcaaatatttacttaatggttacagtttaatgttaacataacttttatattttagattgagaaattgggatgttaacatttcaggtaattaaaaagtcatttgacaagtcaataagattgccagtgttgtacaaggcatttggtccatgctcaataaataacatgttgacagatttttggttgatttcattttcatgttaaaatgtcttttaaactgtatctgttgtaccatagccattctatcctgtaaggcaaagcaaaattaaaaatgaaagcatcattgcaggaattagtattgtcttttggagattgtgctttggagttttacagagattcagaaatttagaggacctcgtgttttctctaatttattgcagccttcaaattaggatggacactaattagtagcatctgctcatctcataaaccaactggagccagtggttgctgacaaacttagagtatgatggcatttttggtacctcactctgctagttgtatttccaaattttgtgcacacaaatttttactctccttttttgacacatttcaacacagattcagatcaggaatgtatttcctgctctactatccacatttcttctctactgctagctctaaaccaaattttcaggaaagtgttacatgccatatttccactacaatcttagccattcttagctacagatggcatggtcagtggttcagagtggtggtttttaagtcagcctgctgggtttccaatctgagatcttctaagtggtcaattaatttttttctatgtcttggtttctttggctgaaaaatgaatgtatccttactgcctttggtataagcatgtttgaaaagaattgacaggcagaggggcacaagcacatctatccttattacacaatagctgcactctattaaacattttgatctgcattgtgaagatgctgatcactaacagattggggctattttgggcaaattgagaatacagagaacaagtttttgaaacactaaagttatccataagattaggtcttttagaatgttttagttctgtttttcagattttcagtagaaggcttcatgctatctaggcgccttgtattttcatgaagaaaaatgatattgctgcattaaaggatgaagttttacatacatttgatttacagcatttggcttgatctcaagacaaatagttcggtgataccaagaaatagtgtccaaaagcacagaaaacatttatgcactaaaggaggagagaggggctaaaatatgaataacatgaaagactttaaagagtaggtcagaagaatttgtccactgtacagtttttagtgagacgtttctcgcctgtctttgtgttggcttatctcattaaatactataacgtatatgaggaccaattgtagaaggaaatgaaaagtttaattataaagcatgatatgatatgcttctagcactgatatttcctttcatgatgtttggaaaatatcatgttatttatttctttagtgtgaactctgtcctgatttttaaaagctccttaatttgaaagaatgtaaatgagtgactctacatgacaagttatttgtttttccttgattacaatattcctctctttctcttaactattccctacctcactctgctcctaacccctggaaatctagtatattgtcaagtaaaatcactttcttgtagatgatccttaggattttttttatatatgagccttaaaaacatttctccaatgtttatttttttaaaacattttgtatttaatagagggacaaaggaaaagaagaaatacaattcatgaattcaaaaaatcagcaaagactaccctaatcaaaatagatccagcactgaagataaaaaccaaaaaagtgaatactgcagaccaatgtgctaatagatgtactaggaataaaggacttccattcacttgcaagtaagttacttcattttcttcttagaataattttccaaatatagcatgcatgtattataatcatgtgtcttttgtgttgtagtcaatgtgatttgatcataaaattgtaagtttgactctagatttaactcactacaaacgaagacttagctctcagtttatggaaacatagcttgagtaagggagagcgcaaaaactgctaccttctaaaatccacagtggctttggttatggaatttgttttctcatctgatgagcaattgaatttgagtaactaaaatgaaattcaattggctttgggttttaaaatatctattcagagtaactttttttttccttgcaagaggaatggaggaatttttagaacagaatttgggcagcagccaaaatttacttcatctttattatatcattgcatttagggatttaaataaaaggtgttgagagaattagtttaaaaattagagagactggtgtcagcagagactgtttaaaagaagaggatagcaatggtaaagtttcaggtgaaaattgatggggcaatttaaagaggcatgaggggacttaaatggagagtttcatgtcttttgacagtccctgtgtgacctcatagggaagaattccttactacaggggtccttaaccccctacccctgccactagtctgtggcctgttaagaaacaggcctcacagcgggagtgagctgcaggccagtgagcattactgcctgagctccacctcctgttggatctgccacattagattctcataggagctgaaccccattgttaactgcacatgagtgggatctagggtgtgcgctccttatgagaatctagtgcctgatgatctgaagtggaacagtttcatcccaaaaccattccccgctccccggcccacccccacccccactccacacccttggaaaaataaaccagtccctggtgccaaaaaggttgggaactgatgccttattactttgccagtgatcccagaagataaaactctttgttttgggctaagagggtgacaatttcattcgaatcgtctcctaaactgtcagaagaagacacatttttttagttcttcattatcttacctcacttatttcccactctttcactccctattttatcttttttttttttttaacagggtcatgcataaaatcctgtacatattaaattctactcaattacatttaggtagtgacccataatgtgaccacagggtttagtaatgtcatggcaagtggtcctaatttcatcttgcctttttcagagaaataaatgttatgggcctgagaggaagagcatggtcagaaaagatctttatcaggtttaggttgaggaaagactgtctgctttccatttctagagtgaaactgccaatttccgggagatagttcctggcaagaggagtgggaattgactttgcaagtatattcctatgataattctgttttattccctgactttcctataaaagccttgctattgttagaaatagagacaactactctcaatcaacatctcagctgtgtagattcatggagatgttccagcagttgaggaggatagagttgtattttcccctctcagggctggaagggcagggaaaagggaaggagaggacacctcattgctgatttttaactttgaaaataagctctcttggacccacaagtaaggaaagtattgctaccattcaattttcacattagtcaaccgtatacttaggaaagaaaaactttccttttgttctatttactaggaactaaaatgattttactggagaagacattaataaattagtaagtgctcacatattccatatatatgagatttcatactttcctaccatattttggttgagttatatttattctccaaatttatggcaacctgtgcagaaaaccacaggtaatattatgtattagagccaagattttttggcccagaaatggtaaaatcctcctcattcacacacacacacacacacacacacacacacacacacacacacgcacgcacatagacacacatatgtatttgggattattaaatatcttagctatatagaattgaatgaacatactatgatactatgaacttagggtcttaatgaatcaaaggatgttgtttctagacatgttatataaaacataattatttaaaaacaatgaaaaataccgtaaaccacttataaaataccaaagaagtgtgcgaaaccatctgtgacgtgaatgagtgtgaggtggaacattcttaaatattgtttttccttgagaagttatcaacaatattgatttcctagagattcaaattattctttgctgggtaggaaagatgaccaagaatgcctgattctaagctcttcaggaaatagctcattcataaattcacttaataagataggaagctttcctcttttagccatggctggcaactggtactagaattgccttcctgccatcaacaaataggaaatagacaaaataagctgtggaaaagattacaactagaacgatgttaagataaagactctaaaagtcaaacctaaaagaagatgcaacttacggaatttgatggcttccacccactttatatggaggtgtaaaataatataagaaacacttttcttaaagaatttgtcattgtattggaacgagagaaagagtgaatgagatcagcaaactggaaatcctgtcacccactttacagatggaatcacttaaaaacaaatttatcatttttttgcgtatttatcattttgttatataaataggttcttttagtgaacaataacaaaaaaccaatataatacttagctataggaatagtaggggtggtatgtcttcataactttctttaagatgttatgtcaaaaagatattctctaatattactagttttctttaaattaaaaatgcttagcactttgggaggccgaggcgggtagatcacgaggtcaggagatcaagaccatactggctaacatggtgaaaccccgtctctactaaaaatacaaaaaattagcgaggcgtggtggtgggcacctgtagtcccagctactcgggaggctgaggcaggagaatggcgtgaacccgggaggcggagcttgcagtgagccgagatcacaccactgcactccagcctgggcgacagtgtgagactctgtctcaaaaacaaaaaaacaaaaaatgcttatataagcaaacctgtttaggaaatattagcttaaatagttatcctcaacaagattttcatagcttttaataaactgcaatgttttataattcaccaaaaaattacattatatgcaaaaatttccaaacacttggtttcagatcccactttttaggagaatccctagcgcattgatatatctaatgcaccttagaaaatgtcattttagaatatattttttacagttatacactttgtaaattactcctgatatctcagatataattgagatagcttaaatatctcaaatataataccattttgtacaagtgtggataaaaatattccaactttctgtgaagttacagaaaaataaagccttcagaaataatttaaatagttgtgttacatattgattttgcatgttaaaactgttatttttctacaagccttttggaataacatgagaatattccaaagagtattcaatctgatatttaaatctactcctacaaaaacttaattttgttctttcttgtttggctatcaaaatggtaggttcaaattttactcatatttttattatgtatatgtaattatgcatttgtttctatattgtccatatgcccatggacaagatgaaccatatgcccattctttaaatactgtataaatagtagtatttcttcttttcattctgatatttttttcagggcttttgtttttgataaagcaagaaaacaatgcctctggttccccttcaatagcatgtcaagtggagtgaaaaaagaatttggccatgaatttgacctctatgaaaacaaaggtaactgacttctccctaaatattgcataatgaaataaagtataatgaaatgtatgtttgtaatttcctgccagagtggtctttctcactgatttttctactatatatgagatattttatgtagtcaattcatccattaagacagttgaaactagtatcttgactatttttagtatggtactttaaggagaacattttcaaaacttttcataatcttgattcccttcctccctctgtttatttttatttttatttttttggagcatctcctagaactggcattctccatgttcattttagaaagtgctactttctttcattataaagtttaaaacactttatattacagcaaattctgagtttgctatagtattttgcatttaacaatgttggataactaaattatagtgatgattactgatgataacaaaatatggagattttggagaaatgagttgggactatgtttcatcatatacttgaaaaaaatatttaaaggaggaattgagaccatattatttgctgattgcctattctggtggtctgatattatgttcactaggtatttactttgttcaaaagcagaatcaagtaaatgaaataattgaagaatgttaaacaaccatgtcctattaaattcagatacataacctggtacaatatatagatgttttcaagttaatagggtaaatgtttaaataaaattaaaaataaatttatggtagaagtaagttaatctttatacacctcaataatactacaaatcttgaacataattcatgatctagtataacaccattcttacttcaaactgtcttctagcttgctaacaactgcatgtactattatttggtaggaatatataggttattacaatttggttgtcctatcagcagtggaaatgtttgcaaaaatatggaaactaataagcaagctacctcatgcatatgcatatataaacaaaaatccacacaattttactaagaaggacaaattaattatcttaggtaactttttgaattcaatataggttttaaaaatcatttaatttttgtttttaatattttcttaaaatggtctatatatttgagcaaatcataattgcttggctagctgagtatacagactatgttaagtacagcgactgctctctggagctatctatgcatatatacacaaaattaaaacttctcaatcatctgtttgttttggattattcagaaatgtgttattttgaaaatactagtagaagctttaggcaagaaatttcaatgttatttgaaatagtttacaagagttaattacttacaggtttgaacggaatttttttcttaaatactgcatatgttttgcatagttgcaataattttatctactttcttcaatagactacattagaaactgcatcattggtaaaggacgcagctacaagggaacagtatctatcactaagagtggcatcaaatgtcagccctggagttccatgataccacacgaacacaggtaagaacagtatgaagaaaagagatgaagcctctgtcttttttacatgttaacagtctcatattagtccttcagaataattctacaatcctaaaataacttagccaacttgctgaattgtattacggcaaggtttatatgaattcatgactgatatttagcaaatgattaattaatatgttaataaaatgtagccaaaacaatatcttaccttaatgcctcaatttgtagatctcggtatttgtgaaataataacgtaaacttcgtttaaaaggattcttcttcctgtctttgagaaagtacggcactgtgcagggggagaggttgattgtgaaaaatcagaggtagatgagaatcttactgagggctgagggttctttaaccttggtggatctcaacattggttgcacattaaaatcacctgctgcaagcccttgacgaatcttacttagaagatgacaacacagaacaattaaatcagaatctctggggagaatagggcaccagtattttttgagctcccaccatgattccaaagtgcagccaaatttgagaaccactgctaaaagctcaagcttcagattgaccagcttttccatctcacctatcgcctaaagaccaaattggataaatgtgttcattacgacagatgggtactatttaaagatgagtaaacacaatatacttaggctcgtcagactgagagttttaatcatcactgaggaaaaacatagatatctaatactgactggagtattagtcaaggcttatttcacacacaattttatcagaaaccaaagtagtttaaaacagctctccccttattagtaatgcattggagggtttactttaccatgtaccttgctgagcactgtaccttgttaatctcatttacttgtaatgagaaccacacagcgggtagttttattggttctattttacctacatgacaaaactgaagcataaaaacacttagtaagttttcagtgtcatgcacaactaggaagtgacatggccagaatataagcccagtcaccatcactctataacctgcgcttttaacaacttcagggcatgacacatttggccggtcagtagaacccatgctgtgatttgtttttgcagtggtggtgatgactgccttgttgaatccactttttattctattccattttggggacacaattctgcaagatgattcttcattaggaaacagagatgagttattgaccaacacagaaagaaaaagagtttgttgctccacactgggattaaacctatgatcttggcctaattaacactagctagtaagtgtccaagctgatcatctctacaacatttcaataacagaaaacaacaattttcaaaattagttacttacaattatgtagaaatgcctctaaaacacagtattttccttatattacaaaaacaaaaattataattggttttgtcctcttttgagagtttgcatggtgttactccctgcatagtgaagaaaacattttatttaagtagatggatctaagtttttcatgaacaaaggaatgacatttgaaatcaatcctaccctagtccaggagaatgcattagattaacctagtagaggtcttatttcaccctgagttttctatgatcgtgattctctgctggaggagtaattgtgaaatagatctctctgggaactggcttcctagtccaatcagctcttttaccaatgaacacttccttgtgatatagatgtttatggccgagaggatccagtatattaataaaatccctttttgtattcaatgagggaaacacataattttcatcaattagcagcttattggaatatctgcatgatggtttaacacttttaagtgttgactaaagattaattttacagaaaatagaaaaagaaatatgtttctgtctggaggaatgatttattgttgacccctaaattgaaatattttactagtggcttaatggaaagatgatgaaagatgatgaaattaatgtagaagcttaactagaaaatcaggtgacctgatatctacatctgtatccttcattggccacccagcattcattaatgaatcagatgatggaatagatcaagtttcctaggaacacagtgaatattaaaagaaaacaaagggagcctagcacctagaagacctagtttatatttcaaagtatatttggatgtaacccaattttaaacatttcctcacttgtctctcttaaagccttgccaacagcaaggacagagaaccaaaaatagtgtatatatgaataaatgcttattacagaatctgctgactggcacatgctttgtgtgtaatgggttctcataaacacttgttgaatgaacacacataagtgaaagagcatggctaggcttcatcccttggtcaaatatggggtgctaaagaaaagcaggggaaatacattgggacactaacaaaaaaaaacagttaatttaggtaaaagataaaatacaccacagaatgaagaaaagagatgacccagactgctctttaaccttcatgtcctagagaggtttttgatatgaattgcattcagaattgtggaaaggagcccatcttttctcttcattttgattttattaactccaatgggggaattttattcgtgttttggccatatctacttttgatttctacattattctctcttcctttctacctgtatttgtcctaataaattgttgacttattaattcactacttcctcacagcttttttttggctttacaaatccactggaaaggtatatgggtgtatcactttgtgtatttcggtgtgcatgtgtagaggggacaaaaatcctctctcaaactataaatattgagtatttgtgtattgaacatttgctataactactaggtttcttaaataatcttaatatataaaatgatatagaaaaagggaaattatagttcgtattattcatctaagtgaagagattaaaacccagggagtaaataaattgtctaaggactaaggttgtatactatttaggtgatagatatggggcaaccgtatgggttttatgattaacaaataaacttctcaccactctaccatatcaacttttccataaaagagagctatagtattctttgcttaaataaatttgattagtgcatgacttcttgaaaacatataaagcaaaagtcacatttgattctatcagaaaagtgagtaagccatggcccaaacaaaagatgcattaaaatattctggaatgatggagctaaaagtaagaaaaatgactttttaaaaaagtttactgttaggaattgtgaaattatgctgaattttagttgcattataatttttgtcagtcatacggtctgacaacctgtcttatttctatttccccatatgaggaatgctagttaagtatggatattaactattactacttagatgcattgaagttgcataatatggataatacttcactggttccctgaaaatgtttagttagtaataagtctcttacactatttgttttgtccaataatttatattttctgaagacttaactctagaatacactcatgtcaaaatgaaagaatttcattgcaaaatattgcttggtacatgacgcatacctgtatttgttttgtgtcacaacatgaaaaatgatggtttattagaagtttcattgggtaggaaacacatttgaatggtatttactaagatactaaaatccttggacttcactctaattttagtgccatttagaactcaaggtctcagtaaaagtagaaataaagcctgttaacaaaacacaagctgaatattaaaaatgtaactggattttcaaagaaatgtttactggtattacctgtagatgtatattctttattatgatcttttgtgtaaagtctggcagacaaatgcaatatctaattgttgagtccaatatcacaagcagtacaaaagtataaaaaagacttggccttttctaatgtgttaaaatactttatgctggtaataacactaagagtagggcactagaaattttaagtgaagataatgtgttgcagttactgcactcaatggcttactattataaaccaaaactgggatcactaagctccagtcagtcaaaatgatcaaaattattgaagagaataagcaattctgttctttattaggacacagtagatacagactacaaagtggagtgtgcttaataagaggtagcatttgttaagtgtcaattactctattatcccttggagcttctcaaaataaccatataaggtgtaagatgttaaaggttatggttacactcagtgcacaggtaagctaataggctgagagaagctaaattacttactggggtctcacagtaagaaagtgagctgaagtttcagcccagatttaactggattctgggctctttattcatgttacttcatgaatctgtttctcaattgtgcagaaaaaagggggctatttataagaaaagcaataaacaaacaagtaatgatctcaaataagtaatgcaagaaatagtgagatttcaaaatcagtggcagcgatttctcagttctgtcctaagtggccttgctcaatcacctgctatcttttagtggagctttgaaattatgtttcagacaacttcgattcagttctagaatgtttgactcagcaaattcacaggctcatctttctaacttgatggtgaatatggaaattcagctaaatggatgttaataaaattcaaacgttttaaggacagatgaaaatgacagaattttaaggtaaaatatatgaaggaatataagataaaggatttttctaccttcagcaaaaacatacccactaattagtaaaattaataggcaaaaaaaagttgcatgctcttatactgtaatgattatcattttaaaactagctttttgccttcgagctatcggggtaaagacctacaggaaaactactgtcgaaatcctcgaggggaagaagggggaccctggtgtttcacaagcaatccagaggtacgctacgaagtctgtgacattcctcagtgttcagaaggtaaataaacctgaatgccatgtgggccattctattccccctatgtgtagaactgtaactcacattaaaggttaacagcaacgaatcaatcataacaaatatgttgttcgtgcaaatgcaactacaaataattatttaaacatttttatacaatgtttttaaaactgttggattatcaccagattaatgcaaaataacagagcgagttatcagtttgaatttcaacactgcctgagacatccctctggggaaagtgaaagagagggtttacttacctactgtcttgagctcacatacctcaaaatctactactgtgtggcacctgaaaggagttgaatgaagcttagcctttcattagcaatgttaattctattcaaccagcacctgcttccacagaaattctgtccaaactatcatgaagtggtgtgacaagggtatatggacccagaagataatacaatataagaagggatcactggaagcttgaccccatgcacattttggtgaaaatgtgcctagaatcaaatgtgacacgtaggctggaactgagtaccattcagaataggatctgaagagatcaaagcaatggagaccaccaaactgtcttgaaggcatgtctatggaccttaagtccatgtctatgttttcagctcttctcacagcataaaagggcattgtccttacttttgcagtggaaaactgaatggctgacaagatggaagagtaaccatttcagcattgtatgtggtttcatttttcttagttatctggctactgaatagccggatttttcagttctgtcagaaactctaaatttccaaaaatctaagtgaaacatggatgaaactctgttagaaaattgttaggattttggagtatttggggagggggactactggaatgctgtccaagttttatactaagatatcttacctgtttgttattaaccaaatatttttaaaaatatttcctccataaatattcatttaatattaggttgatatttatcacataaaaagtaaaggctactgttagctaattgtcacagagaaggatttgttttctgttgttagtgaatttgaaatccttgactttatgtgctacagccagttccatctctgtttgtaaattcttactttccattccatatcatattctgttccctataacctcttcattgttttcttttcttttaaaaataataaacttttctatgatcacgttttgaacaagtctgttttgtatgaataagtctgaacgaattaatatttgtcttaaacttgcacatggaagaaaaaaaaccctacttttaggggaatctctcctattacagttttctgaggttgaaaatcattgacaaggggttttgtttgacctgaaaacgtgttttcaaaggccggtaccttggccaaactttaaacagcttactattttcgttacctgcctggttcttgtgagaatatgatttttccactacgggtttataaggaaaacattcatcaaaatatacttacttaacataggactggactgctaggcgacatagattaaaagtgctagaaaagaagtccttgaataaatcctattttcagttattcttatctcattagaatgtaactgtctagtatctttaataatttgagatcatcacacctcccttagaaaagggcattgctcgttggtattaatggcacatgatgctattggtcaccgcggcaccaaaggttgcagacatgttctttctggaaataattagtggcctggcaatagtggaataactctcctgtgggagaagggaaccaacatctgccctgtaggttaaacatattttggagactatgagttaaactgtgatattttaaattccagctaacacaagcaatgtgttagcaggattttaatgaaaaagatccaaaataagaagcattgtcaaaacattggcagagaaaaagagtgacttataaaatcaataatataaaatatacaaaataatgtgacatgatataaatttcttctaaaatacatataagggggaaacctcaaaatccagaatgcttaagttgtataatagatgggccatttctatccatggatacaaattaaatggtaagttataaaggttattttattatggctaaggtagcaactataaagtcattttgcatatttaaaattaaacaagaaaaacacccataatcaaactttagactgttcaaatgaaaaagacatatagaacagtatatattttttgaaatttttgtaattatgcttaaaacttggctatataatcacctgaaatttgtttaaaattaaaagaattgtatctgatagtcaatgattaatattattttcttataatttaaaacttgaaaatatagtcaatattccaaaagaaaacaaatattcgtctatcacatttatcaccttccagttagataagaggaataagttcaatagatctattgtgtgaatggtgactatagataataatattatattgtacatttaaaaaatgctaagagactagatgttaaatgttcttaccacaaaattgctatgtgaagtaatgcatatgttaactagtttgatttagtccactgacaatgtatatatgcttcaaaacatcatgtcgtacataatatgtagacttttattggacagttttaagaaagaaccttatagagttatacagagaaaataattagtgcttgattcaaaagttttagaaagttgaggtatgcaaaatccattttcttgctttagcgtttgcttgaaatttaaaataaaacaatcattggtcattggaacagatgtcatttctaatgattgtcaaatgatcaagtaaatatattttaattaagccataatcattattttaaaaaatacaatacatttaaaatcccacataatactgacataagtttatgtgtataattcgatactctgtgtgaagacttttaaaaacaaagattaaatggcaagttacaaagattaaatggcaactcataatttatttgacaaacttttatttatatatgttaatttgtgagactatttatattttaaacattcagttttgttgaagtaatcacctgtatggatttttctgagactgtctttaatggaataaaacaaacactaattaaaaatagattcagatactttcaaaataactcttttagtctgtatactcatatcactcctgttttatgacggagaaaaatgaaacacatttttaaagtttggttggttagtatgatgagaaagctgttaaattaatcctctgtgttttctaattcatatacagtttttgtagtattctactattattcagtccagaactgtacttagaacaaatattgaaccgatgaacagaaaccattactctgtgagtttttgtgatctatctagggcagtagttagcttgttttgttttgttttgttttgttttgttttagaggagaacttgctggagcaggtaaataatgtactgacagcaatagacagagccaaagggcactcctacatataaactgttacatcgtttatatgttcacctgtttccttgaatacatggacttggtttcacctgaactgcttgactttaagaaaaattagaagaatctgagaattcccaaagcttgaaaagtgaatatgagttaaaaatttggctttcttgagataattcttatgactaacttgatggcttgattccgtggtaaaacagccaacttttcagccattgactttggataaggtgtccaatctagttacattcccatgcactttccctgcaattcctccaatagatgagacttcaacaggagagcaagttaactgttgtaaacaaaaaagcagagggcaatgaggacaatgttgaaaagggtagggataccaactttctaaagttattgctatcagtatatcataaagtataaccagttagaatatgtaggaaataagttaaaatatataaaacaaaaaggcagtttgggataatgcaaaaaaaatactaagactatgggtcagaagatttgtgttcctggctcaggtttaacattttgtgttttaggtaagtctcttaaaacttttgtgagacttgttttcctcactgtaagaatcagatgatacttttcatgttttcatatttatttgtttgtttttgttttttgttttttgttttttagacagagtcttgctctgtcgcccaggctggagtggtgcagtggcaccatctcggctcagtgcagcctccacctcctgggttcaagcaattctcctgcctcagccttccaagtagctgggactacaggcacgcaccaccagacccaaggtggtctcaaactcctgacctcaggcaatctgcctgccttggcctcccaaagtgctaggattgcaggcttgagccactgcacctggcctataccttttatgttaaaagtatggtataaacaatcaaataatatgtaactgtaatatatttaagtatctcaattcaatcatggcatgtttaattcccaccccaacaataactttcattgctttctaaaatgtaacattattcttgctaacttttatttatttatttttaggcccacaactgcaatcataactctctcttccctttactatcaacatagtatacttatgcttctgattttatgttattttgtccctttataatttatccaactctcatctattcaagatcctagtaaaatctagtctctcttataaaactattacggccaaatacttagaacttcttttttttattttttgagacggagtctcgctctgtcgcccaggctggagtgcagtggtgccatctcggctcactgcaagctccatctcccgggttcacgccattctcctgcatcagcctcccgagtagctgggactacaggtgcccaccaccacacctgattaatttttttatatttttagtagagacggggtttcaccgtgttagccaggatggtctcgatctcctgacctcgtgatccgcccatcttggcctcccaaagtgctgggattacaggcgtgagccaccgtgcctggccagaacttttataatagatcctgttatctagaaagttgcagagcaaagtgaggtccaagtaccagcaacagcagcaatgcctgggagcttgttattagtgccccagcccagacccactgactcagaacttgcctcttaacaggatctcaaggaggtttttgcacacattcatatttgaacaagcattgatctgccacactcataatggaaagtggtcatcttatggaaccatctgtttcattcatgtagctattttttcttaaaaccattaaaatgtgtaagtcaaggaaaaatttttataatactgctcaatgtagtgattaccagaaaataattctattcaccctcgttagaaaggaatatactatcacaagctgcatttgctgaaggaggcataatagatgtaatctctttcctgagtactatacaagagtagaaattgtacatatgaatacttatcttttatgtgtgaccctagtactctattgtacatttcatccaacacgaaggaacaaataacgataaatgctgcatcattttctttgacggtatcaaaatttgtgttctttaaaaaaagagagagatacctaaatgaacctgttaagcattcaaatggaaagctgaaatgtaacattgcatcacctatgttgagcactgctatgaccctggccaacctgagcacctttattgatatgctcatggactccactcatttacagttcaggtgcttattgggtgtagtctggaaaatctcagtatcaaatgaagggaagccgagttggcctcttagctaatgtattaatataaatgaaggaaagcagatggatcaagccaagttgttgcatgtttcagaaagttaatagttaatgtccctattagattataagaatcaaggattcaaaagtgatgattctaatactataatcccaaattactacaaatactcattaggctagattccgttggataaaactaaacattgatgcctcttcccacttcagctaaagttagatgatcagtaattgcaagatacaaatgatgtgtttaaggaagtttgcctgattcataggaaagccaagcaatgatttattccacaggatgctttctgtgctacaaatcaacctgtctgtttgagaagtctcactttcagcaattgatgtgattcagttttctgtgtgacataagaggccagccagaagagaacaatgaattaacctcacaaaatcatcagtaagagcctacctaattacattagcttatacattttaaaaagagtgggaacatggagttcaatagcaggtcatcttctatcctaagccagacaggaatgtaaacctgcccagcttattcaacatggatgttcgctaacagaaaggagctgtgatttattttttaaaaatatccgtattctttgaattgcaccagatttctatatgaagccagtctcttaaatctatgtggtcttgattatgtcattaaccataaaagtatgacacaaactcaattaaactttgtatttcctgtgtatgtatttggagggcaaattgagagagaaacactattgtgctgacaaatagatactgagatctttgcattttagaccaacacgggaaaaatttccaaggatctgtcttttatttccattttctagatacctttgagacagttattgaaaaaatagatagacagcgtcgtggccctatagtaaatctgtgtgacactaagtacaaaaatcccacttaaactgtatgatgtgttctatagggagtagtttatgtcactatttatagacattaggccctaataaaaagttagaatgatgtgtaggattttttaaaaatctgtttactaaacaggtgctgttctttaaatgcaacagtggtgtttttgattttgctgtcagaaacaattaacatgccatactttaattttattagttgaatgcatgacctgcaatggggagagttatcgaggtctcatggatcatacagaatcaggcaagatttgtcagcgctgggatcatcagacaccacaccggcacaaattcttgcctgaaaggtaaaatattaatgaatcatgctttcagtgattcttttacaaactattattcactctatgacacactgctgtggaaattctctttatattatgttttcccgataggacatgaacataacatttagaactcccagaatgttcaggagttcttctgacagaatttctggccattatatttggaggaaatagtctaagggcaaaaagatttatgatgaggtacatgagaacactgactacatagccaactggtcagagtttctaaaatcagcatggtactgaacacaaaatcatcagcagggtatagagtggaagcacaaaaagaagcttctttctctctcagagcagaaacaaaacaaaaccaaagcaaaccacaggaccaattcagtaatgaccactttgacaagtcttagctgtgattagaggtattgttactaattgcaggcaaatctccttctggagcagcatcttcagagactcaggtactgcaggccacacacataacagcatgacataagtagtggtcatagggagtaaaaagtagagcaaaccattcaggttgctttgtcctggtgtgttttgaaattgcccatataaaaagccaatttggagaagtcaggcaactaatctatcttttatccccaggaataggttttgagcttaaattattacccatctccgccaaaaaaaaaaaaaaaatcatgtctacttttgcccatgtattttacatgaaacttttaaggtggaaaaaaaaggaagaagttcatttattttgattataaagaataaaaatacaaataattacacaggaaattccgtcccccacctttctttggaaattgctgttaggtgttttttctttgttctttttctctattcttttttgtttggtgttatttttaatgaaattaaaactccagcttattttccaaataaatgcttgtcttgtcgtttaagtgagagcagaagggatatggtagcaattaaaatcaagtcaccaattcaggactctgttcatttgaagggaggtggggtgtggagaaagtagtgtgatgaagtttgtctcatgatctggtgaaggtgagggcatgacctcgaagggctctatttccaaaactgagttatcattagtaacagcgctattgaaactgaactttcagtttgaactttaagccttccctagaagaggacctgttttcttaatgagcattctacatgaagtcatgtttttgtaatctgcccttaagtgggttctaagagaaagagactcgatttggaacctcagctagtggaaaggtaccacatagacctaacttattagccaggggatgatactctgtccttagtgggatatataaattagtagattcaatagtcagtgatcagcagtcctcgtaaggcaaaacatagaaaacgtcctctttccccagctaggtgtagacaacctaagtggaaagttattttgtgagctgaggggtgggtggtgtttccaggcagatttacgtgacacttttcttggtgtggtttgcagatatcccgacaagggctttgatgataattattgccgcaatcccgatggccagccgaggccatggtgctatactcttgaccctcacacccgctgggagtactgtgcaattaaaacatgcggtaagtgaaggtcaaatttattgcttccttttcctctcacagactggatctaagcaggcgattattagtgagacaggttaacaactatttaacttgatgctttaatgtgtgcaggttttaatattttaagaatgtgttacataatcctacccaatcttttgcatttttggagactgattattttgactgtgataaatatgcaaatacacacatccatagaaaacatttttacttatggcaagagcctaaacattctaatgttatcaagaaaatttaaaaaaccacagagagagaaaaagatcggaaatgtgtgcagcatcacaaagtcattaggggagtaaaagctaggaccttagttccttaccttccaatcctgtatcctttacctacctttcctccccagagacataacatgggctctcaactgatggtgaacttcttctggtgagtgacagaggctgcagtgaagaataatgagtctaatagaagtttatcacagatgtctctaatctttatagctgatccctacctctctcgctgtctttgtacccagcctgcattctgtttcgatctgtcttttagcagtccatacaatcatttttctacatgctggcccttacctagcttttctgaatttacaataaaaactattttttaacgtgttttatattgttcctttcaatctgtgaacttggtcctctcctctatggttaagtcacacattttcactgttctcttaaacaatattacataatgttttcatttctttgaatacagggctaatttttttcaactggatattaaaattctttaaaatcaatagaattgcataaatttagtaaggtataataatgttataaattggcctgataatataaagttatgtatatatggacagacatgtaaagctaaataacctacataagatcaggcaccagcacctagagtaaaatatataattaagagggcatggattgattttcatatatttcactatagcagaatgatggggaagttcctctgaacaaacctaactgaatattatccacactatggtactgccgaggtaaatctctctcaatctagacctgctaataaaaggaaatgttttggacaactcttaatactttggacaacaataaataactgaagaatctggaagcctttcagagtaaaacactgtgttccaaggaaattgaatcatgtgttttgtcctttaaaataaaagatgactcctgtgacagtgtttctctgcatagattgggttggttccactcattgctttttaaattgtattagtctttccattgttctacaccagttaggtataataaaccaactgtttcccttctgattttttgtgtgtgtatgtatgtgtggtttaggtactctttttttttttttttttttttttgagatggagtttcactcttgttgtccaagctggagtgcaatggcacaatctcagctcgccacaacttccgcctcctgggttcaagtgattctcctgcctcagcctcctgagaagctgggattacaggcatgcaccaccaaactcagctaattttgtatttttagtagagacagggtttctctatgttggtcaggctggtctcgaactcccgacctcaggtgatctgcctgcctcggcctcccaaagtgctgggattacaggcatgagccaccaggcctggccggtttaggtactcttataaattttctctggaataaaacctatacacacacacacacacacacacacacacacagacacacacacacacatacacactcacctgcatattcacccaactggcatgcacacaccaagaaatccaaatgttgccctcctcttcagttccaaaccaatctttagggtatttttaaaaagagactgagagaggcaagaaatagaatgactatgacactggctagctattaagtaggtttcttttttctcttctgtccaaaaaggagctggctagttatgcaagtaacatgctatataattccaatgtctttgttaagcagaggatagagtttatagggtgttaattctaaaaaaatgataccagaatttgtaagccaaacctatatcactcaaatttaaaaagtcttctgagctttgggaatattttggaaatattttattaaaggatagcttttagtttaaaaaatacatatatgaaagagatatagatatgactataaagagacgatacttctattaaagtggatgaaataaaattgacattctggaaaccataagagataatgttttatgaatattcttttaaatgttttggttcacatatatagtaaagcctataatgcaaaaccaaaaatttggtggtggattcaattgtgcattgattttctattgtggcataacaaattaccaaaaccttagaggctaacaacaacacacgtttattatcttatattttctgtaggtcaggagtccagccataactcaggcaggctccttgctagggtctcaaaaggtcctgatcaaggtgcctacctcacctcaggtctcatctaaaactccatgttgcatttaaagttcactagttttgacagaattcagtttcctgtggttttaaggctgcagtttaattcttctagagactgcctaactttctctgacacataaccctctctacaatatggcagtttactcctgccaacaggatagcatctctcctgctttgagcttttgacctccagactctcttttaaagagctaacctaattaggtcagtcctgcctaggttaatttcccttttaattcacttatagtcaactgattagggactttaattacatatgcaaaatctcttcatctttgttgtataatataacctaatcacaagagtagttctcattgtattcaaaagtttcatccatacccaaggggagaagattatgcagtgtgtacacaagttggtggggatctgggggaccacacatgtatttacttgtactggttgtaagagataattaattattattttttattcgtatcattaactgggccagttttctggttttctcttagtccagtccagctgaactcattctgggttttcaatgtttccaaaacaaagaataaagataatgattatgtcacttactctctagaaagttggaggggaatttctaaactcgtgttttatcatatactaactgtattagaaaatcataattaatatcatttatttaacacccacaaagaggtgctttccattgtagagttaacaatccttatttcattcttagcaaatggttgcaattaggccagtgaggaagggggtaaagagatggatggctggagcagtatggtaattcaagacaaggtacatgattgatatgggtagggtatggggtaaaaacagaaaactgaaagaagttgagaaaaattaagttgatatgaggcagatcaagtaagatccaagagtagcccattcagttgccatgagaaacactgaaaaattaagcaaagggagggatcttacctcatttgtgatctagaatagtgatctctaaactggtgtccatgagacccaggaaaacacaaagactctcttaggggcctttgggcatagattgcttaaggggctcaagttccacctcttcttctctcaggtgaattctttcccaaaggtcccttcttgagatacatgtgtttctcagaagccaggcatgtcaacacctctaccctcccacactgccgctctttcctactttacctgaattttactgtagctcattgccctggggtttaaaaaccctggggacactaaacaaaaagatctttgaaaatacattaaacatatattcatgctgtttataatttatggagtactgataattgtatctctatacactatatatgtgtatacatacgtgcatgtgtccactgtatgtgtgtatttttctcttaaaaccttaggtcacaagacatcttaaaatgtaatttcaatgaataaaaagctttcagagaagtatgatgaggtgaagaataaaagactattcaacacaaaatacaacacaggccagtaagaaataaagagtgtgattaaggcagtaagcagtgagaaaaacaaggtggggaaggatgtgaacaatatcaaaagggggaatgtacagtatataatgacaaattggttatactaggaaatgggatagggagagagaaaagcctaaaatattttaaaattattgggtagatgacatatatataagagaggcattaatttgaggagaaagatcacaggtttagttctgcttatattgagatgcaggtgcttggcatccttgttcatagcacatctaagttcattcttctccggaaagtcaaggaaagtcacaagtgaacagggatagcaaaagccttgggcatcagcaattccacccagcatgttgagaacacaaagagggttgtttgcccctttctccatagcattcattgaataaatattttctgagcagctattatatgtcaaataaacacttttctagtagctggggatacagaagtgaataaaacagaccaaggcctataacaagatagaaaattcagaatttttaacacaaaccagtaaagaaaaagatgacactgccttaatattaggatattcacatctgccagccaacgtttgaatactgctctccttttatttgttcaaaagctgaactacaaatgtgttctagtcactttgcttccaagcttctatgttacaatcaatgtatcactaaaagtaaagaattaatgttgctcattgtctgacaaatgtgtgccagggtgctctgggatgggccttttcagacttccttcacactgtatttctcaggaggggatatatacctaaatgtcatcagcccacaaatattctgtgtataaaattttaacagcgttttgggcacatggaattttaagacatcacgaatatgtaataaaattggaagtcctgcatagtgcttgaatgaagtactgatttttttatgtttttctctgattataacttcatattctgaataacagttggttctatatattagtttcctgcttttcagagacaaataataatgtttgttaaatttattgtattttttctgtaagttttaaattcaggcataaatgtgcaggtttgtcatgtaggtaaacctgtgtcatggggttttgttgcaaagattattttgtcacccaggcattaaacttagtacccattagttatttttcctgatcctctcccttctcctatccaccaccctctggtgggccccagtctattgttcccctctatgtgtccatgtgttctcatcatttagctgccactttaagtaagaacatgcagtattagtatttttatgaagtaaactccaacaggtgcctggcaatttaaaagctctcttgtgattgataccccttagaaatcacactgagtatttagatcagttcacaaacttcttggactgaagatacctttatactctttgacattattgggaagcccaaattatctgtgtggattatatgaatccatgtttttctatattagaaattaaaacagaaaattcaaaacatttattaattcatttataatagcaataaggccattggctattaataaatatattttaatggaaaatagtaaaaccagtggcattgtcaactttttacaaatttggcatttaaaaaaattttctttaatggcaccttaaatgaagacagctgggtgtcttgtatttgcttttgccatcagtctttcaggatatcacatatcatgtgccatctgaaagtttcatggtgtaaagaacaaatgatgtcttaacattactgtgaaaatagttttgatctcctggacccctgaaaggatctcaggaacctcaggtgtcccaggacgctctaagaacaacttcttgctatatatcagaacatgcaagactgatatggtccccttaagagtacactaattagtatttacctatgagctactccaatttccctcagcccctcggcaccagaaactcgcctcttctcttattgattatcttttaccctgattttcttcatgaatcctgtaaaggggagatgggagggtctgtttcaccttttaagctctcttttgcatgatttaggctctattatttgcccagtttaaaatccaaaagcctggtataatcctagatatagccttctccttcactcttcacatttgatttatcactaagtcctgtcaattttatcttctacatacctttcacataagagcatttcactccatcattgtctcctttgtccaagagagtatcattttttaacatgaatggccttcagaatgaaatatctatatccactatttttccctgcaaaagagaatgttttcaaaagtatatcattcctcatctatagaacaccacacacacacacacacacacacacacacacacacccctctacacataaattaaaaacccttcagtgatttcctttgatcttagggcaatgacaaaacataaccatctgttaccgcctatctatatttctaaccttatatgtgacttcatatacctccacatttctctccaggctctcatgctgtctgttccagccacaatgattttcttcctttgcctcatattttccatgttctcattatagtctctttaccccagccatgccttctgctttcaaaaaattttactttcttccttacctagttggcagctactcattcacatttcaactaagttatgatttcctcacatcagctccttcatttgagctcccttactgtatcatctccatatattcttatgataaagtttaatttataaattaggcacaataagagattaacaacaacaataaaatagaataatgataacaatatgccagcatcactatttttgtgccttggggccattgttcagtaaaataaaggatacttgggtatcagcactacaaaactatgaccgttgacctgatcacctagaaggctactaagtgactaaatgggcgggttgcatatacaatgctagacaaaggaatgagtcacatttgaggcaaaatagaacggagtgtacgtttgaaacgtatgaattgtttacttctggaattttttatttaatatttttggatgacggttgaccacaggtaactgaaatggcagaaagcaaaactgcaattaaggaggaactactatacttaagtgcccagaaacactttagaagtgagacgtgggtagatctttgataactaaggtgtctattcgaggtattgctctggagtgaattgtgtctcccaccaaatccatatgttgaagccccaactcccattgtgactatatttagatatagggattgttaagtggtaattaatgttaaatgaggtcatgagagtgggccttaatctggtaggatcggaggccttataacaagaggaagaaagagagaattctgtttttctaccatgtaaggacatagcaagaaagtgaccatttgcaagtgaggaagagagccctcaccaaggacccaattgtctagcaccttggtcttgaacttcctagcctccagcaatgtgagaagataaattatttttgtttaaatcagcaaatctgcagccttgttatggcagcaagagcagactaatataggtatgtttccattggaaacaaatatacaaaaaaatcctttcccttagtaaccaatgaacatggacataactttaaaagaacatagtcgtcttttaaaattcagtgtgtttatatgatgagaaaatattttttacaaattgtatacaattacaaaataatttttacaaattattttctttcttagacaaagctgattgtttctttgagttttcctaatttatccaaggccagaatagagattcacagaaataaaatcttgtgtcctgtgtcagaaaaaaacaatgccgtcaataccctttttcaagggaaaaatcttttacttggatgtctcttccaaatcatcttctaaagaataaggctatagaattgaagacctttcatgaaagtcttgtctcctgagcattttgtaccagaaaaagcttagataaattccagggaaaagtttgaggtatgaatcctggcttcacatggaaagcaaacatgcaagcaatttgaggttcatattttggaggtctttactactttcccatgtcaattttaaaacaagaagctctttaaatttataatgagctggatcctggtcttcatggcccacagagcacaagtattgttgatgggagagtggctttattacacactgttctcaatcccgagggaccttcataaagtaaattctatttcagttgctctttagtagctgggaagaagcagtgggttaggttgaactgctccaggaggttatcgggtatttgtctaccagcctatgaattgacttattcttagctatagggaaaagagaagcaatagcttgtctccattgggaaatctgggttttcttttggtggggatgttgagggcagggtgggtttggtgaaaaccgtagatgtaagcatttacttatcattcatatgaagctcacagagccctgggtgtccctgtttgtaacatactatgcactcctcctctccagttaccattcagacctctatcagggccctgtggcctctctgcaaggctttggctagcactttatagaaagaagtaatcagatttttttttctaattagtgatcttgttctcttggtctctgttgggaggcaagatggttgtaccaagaattagacaacagtgaatactctttgtctcaaaaaaaatctgttcaaatcttaaaattcacttccaaattttgtagcaatcagatcacagcacaaccacaccagcaaagtgaaattaatgttccaagaggcatgcattgtatttgttcatattcaaacaggacagtgaaaaatttcgatagcaaatgttgttttacttaaagcatttccaaacagaaaattttgtgtcaatcatcaaaagaaagcattcctttactcatagaccactgatgattacataaatacctttgcttctgcttccaatgggtagccactgctgatacccctggcaaaatgttttctttgttggaactctcagaagagttccagatattttcaatgttaactgggtagacatgattgcaaaaatatttgtgtatggggggatgctgtattttaaaatacttgttgctttgtctaaacaatcaacttcagctgatatttgggaatgtttctgtgttttctgacattttagtttggccaatggagacttttcaaaaccctcccttactcaggtcccatgttaagtattaagtacaaaggaatgcctttcccaacatttaatagccctcttcaaatcaattgtcatgaaacatttgttttatttttacacccagttttgatatttatacagcagggctgcaggaggagtttgttttactgccatcgaggaataattaattttgtttgaatagtaagtatgtgagcagcaaagatcaaacatttatatcacagttaaatggtctatggacaaatcattcatcatggtcctcatcagatatttattaaacagcttcatggagactcataataactcttatttattgatgaaaactatttagttaccttgtcgtactaatatatctttattcgcctgtattatttattctatacattgccaccagaattatgtagtttttatttatggggtgacttctagcagttgaatgtcaaagggaataaatacaatgcactgatttcagagggtactttggagttaaagaaaaatactagctaaatactctagtttgtgtttaaaataatgacaaatatttccaatgaattaaaacacaagaaaaataaaactattaagttgttagagttatacacattttaaagttatggatatttatttttaaaaagatgaaaaataataatgttattatttagattctttacatcttaataaagcctaatgaaaaagttatatttatttggtaaaatattatatttgtattaattacagtaattctttgtattctataatttaaaaaatttgaaaaggttttattttccgtctccaaattaaaatatattaaatagtttaaattattgaatccaaagccagcatttgggtttttatttaatgattttacatactttttaaaaaatgaatgttcaatgacttttcaagtttatagtaaatgctttaaaatatgctaatgaaagtttagaaaaaaacctattcagcataatagctcaagtgatgagatttatatcattgctatttttaaaagtgaaagattcttcaattaaatcttgttggaaacctccagctgaagtagagaattagcactaacaatgcatgtctgaattgacattgaagttttagtggataaatcagcagtgaactattttcctgtatattttaaagcaagtaggcgtttctttgacttggggttttggtaatatagatctttcatttcacagaggttcttaaaatttcaaaatttgctctcaaattaggaatatgtttagcctttatcagtatttaccttttatcattcctcttaatatttcctgattatcacgtgattgcttatagttgctcattgcacctgccaaatattgattttttaatgaattgtgataacctatgtctaccttactgtctccatttttataaggtatatttccacttgtgtctgagtttaagggtctaagtattgcttcagattgtaactatcatgggtcatttctgtaagagtgtaactttaaaatgttatttttggaaaaattacttagaaattcgaatcacccttgactaataacatgctctagaaatgatagttggtatttaatcttacgttgacaatgtagacagaaaattttactctctcacccctacccaggcatatccttacagtaggaagttaccttcacatagtagaggaaacaaacagccttttgaagctgcttccatatttagaaatttcaacaatgttcgaatccttaatcatatctgaatattatattcattttatttattgtcttgattggtatctggcaaatcatacttgtgtccgaggagtggtgggttaatttttcatggactgagccttgaactagtttctcagtgagatgcaatggatggacccatatctagccaaagatggcactgattgacacctggactcatcaagactggatctgtgagttatgtgcacagcataagagtagtgcttgagaagaatggctcagtagtaaataatcaaaataaatcacatacaattaagtaggaaagtaaaagagttgaggtacctgaggcagacaatgaagtctatgagattagtggaagtgtgtttacactggctgttctaactctgaactcccttccattgtcaggacttagtcctgactgaggtcacaagtttgctgcccaagagcttgtgcccccaaattttcttttagcatgttaagctaatgaactgatagatgcccaaggacatttatttttgtctcctttcccatcagttttataactagatatgaaatatagcagtacaaacttgaccttgtacctgttttagagttatcaccttttaagactttccccatacattcagtttcctcatatcatttaacagttaattcaaatagtcagaaatagagtaacttaatggcatttatattgatgaaatatagttccttaggacctatgaaatccatcttattttgtatttcaccaaagacctttggatagtattgaaattataaaagacttgcataatcagcatcaactttttctatacaagccatttccccaagtccaataatttttgttcttcctaaaatcaatatatatcatcaatatcaatatagatgaattctctaggctatcagctctcagttaccactttatgggtcaattactgaacatttttcatcttcatttgagtttctttttaagtttggatatttctgagtcatatttctattctctgaagcagatatacaaaacattgaaacactttttaaatgggctgcaataaagttatttaaaaggaatttactgaaaatttgcacagtacaacttatttcagtaattagggtagtcattaaggtaatgttttccctttcttcacaaagcttcgtagaataactctaaacataagctattgtttagtttgcctaggttagctcatagaatgcaatgaaataaagcattcaactaactacataaggtagaaatggtttgtatgagagaggtgtttagatgaaatttaaaagctattaaaaatatttacactattaactatagaaaactttcataggcatccctagtcactgaaagcatgtctaattctggcctgtccttcgtacagtggtacatccaattccaaaatggataaatcaatgaaatttactcaaatcttaaactgtcctagaggctgccaacttgagtttcatccagaggcatcttgaatggccatttagattgtaaaggtagctgggaagtttacacttttatcaaaccataaacattttcatgtatgttttaagaagatatatgaattttagttgctctggaatgttttgagttacattttgattgactaaacattacagagagagagagagaccaaattgtggtaaaaatttaattttatacttttattacttagtgactgagggtttcaaatcttcatgacgtatagtaagcattgaagttggactaggaaaaaaagcaggagatagatcttcctaggaataactgattttttctttattgtcaacaagatgactaaaaatatatttaacatgttagcttagaatttatttatttatttaatttattttttgagacagactttcactcttcttgcccaggctggagtgcaatggcacgatcttggctcactgcaacctccacttcctgagttcaagccgttttcctggctcagcctcccaagtagctgggattacaggcacctgccaccaccactcctggctaattttttttgtatttttagtagagatggggtttcaccatgttggccaggctggtcttaaactcctgacctcaggtgatccacccacctcagcttcccaaagtgctgggattacaggcataagccaccatacctggccagaatatatgtattatattggaggaaaattatggttaatttcattaccactttgtatgtacttataagcaagctgattttagaaataattgtatagtcatttcagaaacactatatattcagcatatataagttatacatgtggaggtaaaatgcatttaagtaacttttcaagaaaaaactaatttaggatttgaatgaaaggaaaattggaatgaagttagtaataatgttaagttaaatttcttattccactcaattattataaaagcttataagtaacagaaaaaaaaatctgctaatacaaatgccaatgaactctaagaggcaaatgacatcttcaaagattttatataagtttttttttgttgttgttttttgccaatagctgacaatactatgaatgacactgatgttcctttggaaacaactgaatgcatccaaggtcaaggagaaggctacaggggcactgtcaataccatttggaatggaattccatgtcagcgttgggattctcagtatcctcacgagcatgacatgactcctgaaaatttcaagtgcaagtgagtaaagtaggcaaatgttatacatttcagtaggccctggggaaaatgaggtagagtggttactttttactaattttgtgttagtgatcaaacttcagcgtgcccagtgataatcaggagttaaaaggcagattacacctccactcagagattttgattctcttaatctgggatttggtcctcaaatatgcatttcattaaggaccctaggtggttcagatccagagggtagattcactatgctttgggaaacacatccctaggtggatttctgatcacagttttgctcttctgggtctgtttagtaaatcagttaatagtcatggcagccaggcatgtttcaaaatactgccttcttaaattttcgtattagctttgggaggattacacatttttcctttcgaaagaatggaaagaaaaggcctaccactgaagagttattagccttaaagatctgtgaataaaataatttttcaaagcttaaatgaatgtgttcagttgtttctggatttgctttgaaaagtggggaagcaaatcaattgtgtagatgactcaagccaaagaaactgcccttgagtatcaattacatagttgttttgtgcattctctatgggtacttttcacaccatttgacttttgcagacaggcacagacacaatgccatgtgtttttaaattgtccaccttgttatgaggaacataaagtgattgcttttgaaattaataacacacatcattcatagtggcttttctgaaatagcacctataaataacatatattggctttatgtaattggcttttaataagacagcctaacatttctgaatgaagagctatgagcactagttggcccatccgccataggagaggggagatttgtgttgtatgtgtgtgtgtgcatgcacaagctttagctagttctgtaatttatttgtttaaatagtaaatattaatctaagattttttcccattagtttacaataacaaaattgacagttgtcatgctgggtttatttccctcatttccatcacagcaattcactctctattcgtgacccatgggtttcacacctgagaaatacatatcaaagtagaaaaaacaaagaaacagagaaaatattagttataagggacaaaggagatagtgtcactgccattcacatttttgttaacttctaatgactagtaatacccaataagaaattgtgtacgtaaagatacctagtgaaattcatctgtaagaaaaacagaatggatataaacatttaattcacagacttcacaagtgaagcttaagtatcagaagttacctgttatatcttggtagaatttaagccatcttttcttaattttgttatttgttttaaataaccaaacataagtattaagaaacaaagcttgtgcggtgttataaaactgataaaatctgattcaacatttttctcaggacattgatttaccatttactatttgtgatccagtagtgagggggcgtactggtcacgtgtctctattaaacattaaacatgaaatattacttgcccacttgccccagtactgagaccttaaaaatggcaatctttggaacactgtaactgaacaacactgcctgtgatgaatcgacatgaatcataaaatcatcaatttactttagtaattgtaaaccatcctttcttcaagtgaaaagtaaggacctagtaaaaatatctgggcaaatcttgactttcattcttgcttaatctagattattgattgaggtgcttctaatacagatgttaaagtcagtccaaactaagactttgatagccctcgatcttcacttaattagcttgtctaaatgaacaatccagaactttgggaggatgagacgggaggatggcttgaggtcaggagttcaagaccagcctgggcaacaaagggtgactccatctctaccaaataatagaaaataaaaccaaagtgtatgcaaagttcatgtaaaatttaacacacatattttatactgacatagattttttttaaaaatgtaagtataaattgcttgtctcatctattccagttaataattttataagaaggctaaaggtttgaatatgggttatgaacacttaactatacagtggctttaattattggtggccgatgttctcatatccttaaataatagtttgtgtcaggacttactttgatgagataagactaatacttattgactttctaacccaacacaagcttcttccttaaaaatttctcagtttcggccgggtgcggtggctcatgcctgtaattcccacactttgggaggccaaggtgggcagatcaccaggtcaggagattgagaccatcctggctaacacggtgaaaccctgtctctactaaaaaaaaaaaaaacaattagccgggcgtggtggcaggcacctgtaatcccagctactcgggaggctgaggcaggagaatggcgtgaacctgggaggcggagcttgcagtgagccgatatcacgccactgcactccagcttgggcgacagaacgagactctgtttaaaaaaaaaacaaaaaaaaaacctcagtttcgaatggtccatttggatattaagataattgtataatagtacttctaattggacctaagtgatacaaatactgtggtttccaaaagattgaatattaatatagttattaaaaaggaatctatgaaatgaaagcacctacttatttaaaattagcatatttaataaattttatttattatgaaatccatattttatttaatgtgaaccttatttatattgatagaaaaccattaaaagtcttctacatacagagaatattagcatagatttttttcttattaggaactctaaatttctaattaaaatactggtaaaatgaagaatatacgtgtactacattgaaaatgtgttctatagttcgtttttctatagtataactgggccttaattttacagaaatatatataaagattttaggtaacctctctaaatcaataaataattgctttgtaattaaaataaatcaatgcatcaaattaaataaatcaaagaaatgcagaactcaaggaaaaatagctatcatatttttgtggcacatatttgaatagattgaacttccattttaaatgagagtaattaattactattgataataacctttcttccacaaagagagatatgtgttgtttctacacaatatgtgggccatgaacatgtaataaataacaggccaatgttttgaaatggtaccaattgagagtctcaatcttaagactgagtgagaagaatgcagcggtaccgtttctctcttttatgaagcagtaatgtttgggtgaaactctaggcctgtggaaggaaaaaaatattaacatatgacagcatttatttcagtaatttgggcagagtcagttatgtatactgaatattaaattgttatagctattctgagtccaaaaagttagaactctatttataaacatgcatacattctagaattctagaaatgtaatagcgctgacttcaccaacgtaagaactccggcaatttacattaacatgcttattctcaatagggacctacgagaaaattactgccgaaatccagatgggtctgaatcaccctggtgttttaccactgatccaaacatccgagttggctactgctcccaaattccaaactgtgatatgtcacatggacaaggtaatagctgacattctgcagggtgggcatgattaaattcaggggaaatgcctaaagggaggacacattttacagcataagatctacttcttgctgcactggttttgctggcttgcaaacaaaatcaccaagtttgaagctggatttttcttatgtttattcactcaagatttatttatttagctgagtgtatgctactgacagccacagttctaagccttggagatataccagtaaacaaaactaagctatctgaccccctggagctaatattcaactgatagaaaataagcaaaataaaaatgagaatgggaatattacagtagtttgtcataagcagtagagagaaaaatgtcgcagagttagaaaagaggggtgctgctcttttatattttaatgttcagggaagatcttacttgctataagatcttacttgcttaacatataagaaggacccaagggcagtgagggagcagcatgtgccatgcacatatatgtgtaagagtattctagataaagaaaactgcaaatgcaaatggtgtgagatgagggagttctgggaaagttaaataaataagcacatcactatagctagtacaaaataagtaagatgaagagtagtaggagatgagattagagaggcaattgggctaaaattgcatcagcctttcaggaattgtttgcccttttgctctgaaagagaaaggactcttaggactcttctctgaagggagaaattacacaatctgactaagttttaactggatcactctggctgcatttcggaaaatagctagaattcttgacaagggttaaaacaggagaaccaatgaagtggttgtttcagtaattcagactacagatgggagtgacttgaccctggttgttagcagtgtagctgctggataatggtggggtttgagggaaatcaccattgcatttggaaacatagatgccattgaagataactgcctcagggagcggtagtaaaatcagattgaaatagatttttaagtcaaaaaataatagatgatggtgaggttgctgagaaaaggaaatgcttatatccccctgttgggaatgtaaattgattcagccacatggagatttctcaaaaaacttaaaacacaactaccattcaacacagcaatcccattactgggtgtatacccaaaggaatatacatcattctaccataaagaaacatgcatgcatatgcatgcaaaataatctatgcacccaaccccggtgacacacaatttacatataacaaacctacctatgtacccatgaacgtaaaataatttttttaaaaggtagatttttcaaagaaataatttgttaaatattaataataaagttgaatcctgggaattactgatgtatagtaaattgagagttatcctttttaaatgatcatgttctatttcacatagacttaattgtgatggtcatgatcgtggttagccctaaatcatccttgaaatcccaagccaaatttaaagctccatctcatagacctactgccctaggcatacttctatcctttaactttttccacagtgtcattcttcacgagcaactctgaaaatagagttgtagagggaagaggggatgagtcccttttcagtcaatttcactgttcctttaaggatcagttagaaataaagttgaagccaatgattaagggaagtttggtaccagctgagtcttctgtgttcctgtctcatttacttgaacatttgttaataatttgtgagtgataaaggaaaacaattatttgataaacctttggtgtgtattaagatattttatatacatatacgtcacttaaaaaggatcaggtaatagaatatgaaaattttggattctggagggtaaacatgttattgcttatcagatcattcattcataggtgaaaatattagttttatggaatttaagtaacttgcctaaattctcaaatacagatatatctacagatagatctatctacttagatctaggtatttttctatagatataaatctacacacacagatatatatatatgtgtatatatatctatatgtgtgtatatctatctatatatatatatgaaagatgttactcttatccttctccataaaacagaaaatataagttctacatatagttagatgagtggaaacatttttcaaatcttgcaacatctgaattaatatatatataaatattcttccaactggatattaaaaacactattaaagaaaaatgaaaactgaaattacagaatttctttaaaatgttgataaaacactacatattatatatactatatattgtatacttaaggcagtaaacaatataatttaaatatttatatcaatatcataaaatgtatttacagttatttcagtcttaaaatatattctaatgagagtatatacagtcagaaaattgtaaccaaaaatcatctggattttcttgctctgtattaatggtatacatttgatatatccataggcatatttctgtctttattttcatctttctggatattagtttttgaatatttaaaaccttaacattggataatagtaaatactatatgaaagggtaaattcagagaagtgtcctcttctcttgcttccatgccattccatttctactttctactcaccattgcaagtagacaatttcattagtttcttgtttatggctcttgagtattttccattctttacttttttggaatgtatgtgtaggtttgttacataggtaaacttgtgttatgggggtttgttgtacagacaatttcatcgcccgggtactaaggctagtacccattagttatttttcccagcataaaatcttaacgttgatgtaaatttgcagatgacctttcatagtcaaatgtacagttttcattcatataaaaattaagaatgttaaatataaaaagtcactttaaaaacgttcggtattatttaaaagtatagaatatttttaaaagtagaataattctttttaaatttgcaatgcaacatatatatatatatatacctttttaaatttcttttttttttttttttttgagacagaatctcgctctgtcgcccaggctggattgcagtggcatgatcttggctcattgcaacctctgcctctggggttcaagcaattctcctgcctcagcctcctgagtagctgggattacaggcacacgccaccacacccagctaattttttatatttttggtagaaatggggtttcaccatgttgaccaggctggtcttgaactcctgacctcaagtgatccacctgcctcatcctcccaaagtgctgagattacaggtgtgagccaccgcgcctgaccaacttatattttttgaagaacttgatttctgactacatttcttttgattaaaaatatgaacaatatggccgggcgcagtggctcatgcctgtaatcccagcactttggaagtccgaggcgggcggatcacttgaggtcaggagtttgagacgagtctggccaacatggtgaaaccccatctctactaaaaatataaaaaattagccaggtgtggtgatgcatgcctgtaatcccagctacacaggaggctaaggcaggagaacacaaattgctcaattaaaaaaagagaaatagaaaacctcatggagcatagtaagagacccaggagtcagtttaaagtggcttccattggccaaatttggaacaatttgagcatcaaaatgaataacaggaatagattatatatcatattaaataaaaagaaaatccactggtcaacatttaatttactatttctacagctagtgctagcacttctactactaatacctaaatgaatggggtaagggaaaaggaaaaatttttatttacagaagaatgctaacgaacaaatacaaagaaatgttagaaatagcaaaataaccattttatcatcagcatgacaataagtggttcatgcaaaattcattaacgtatgcctaagctattttgtgaaaatttgtttggcattaggatatttattcagactcaaaggccccaaccgatttttttgttaaatacagaggagtttttcctttgcaccacttaaccaagtgatcaaacacatcaccagtgatggaacaaagtgacatcatgtgtcacaagatgttatgctctaaaaaggacaaagcatcactgatgcaatattcctgtcaaatatctttaacttggttttattcatgagaaaataaatcaaacaaaatgaacttaaagagcatttgtaaaacagctgacttgggtgactcagaatgtcaatgtcataaaagacaaaaatcaaaacataaggaatgtgactaggagatgaatgttcgttatattacttttctatggaatgaaatttttcagaagaaaatgttgggaaatacatgtgttagtctaaaaattcttatttctttgttgttccaaagggccactcatttaaattattttgtttttaaattattatttgttatatttgaatttgcataagcccttattttgatgaagatactgggcttaaaataaagattttttaatctgagatatttgagtatttttgatttgtacagatttcaagtactttaattttttttttctttttgttttgagacggagtctcgctctgtcgcccaggctggagtgcagtggcgccatctcggctcacggcaagctccgcctcccgggttcacgccattctcctgcttcagcctctcgagtagctgggactacaggcgcccaccaccacgcctggctaattttttgtatttttaaagtagagacagggtttcaccgtgttagccaggatggtctcgatctcctgacctcgtgatgggcccgccttggcctcccaaagtgctgggattacaggcgtgagccaccgcacccagccctttcaagtactttaatttttatgttgatttcatgattccatatacttgtaaaaaacctttttgttttatctgccttgatattcattggacttatttctgtatattttatgtctagattgttatcgtgggaatggcaaaaattatatgggcaacttatcccaaacaagatctggactaacatgttcaatgtgggacaagaacatggaagacttacatcggtgtgtaaatttcttcctttcaatatatagaatgtagtgataccaacagactgtgtatttagatatgtacattgctatttctttctattcttttatatatcatggtaagctaataaaagcattagattggtttttctttacaactcatcataacattgtttctttatgtagcaaacttttaaatatgcaattcaagttagtggatatttattgagcatttactatgtgttctgtactgtaattggtaccatggggaacatcaacaaaaagtggataatgttttggttccaacctccaaggaggatacggtcacattgacacaatagttacataacttaataagacagtgtataagtaagtggcaaatctggtgtttgaaatattgcatgttatgggattattgttttcatatttaataattgatagtttatgaaaaatcaatgaataatcactcatataatttaaatttctaaaatactaaaccttaactattaaaaatgtgtaatgacaggtttccttatgtagctttgatacataaaattttccagtaattacaggaatgtatatgtagttgaaaaaatctacaaattttagagaattacagatttttaccatagatatactcatagagaaggtagcacccactcaaccctagcaatagtgctagtgtttacaaaattgcaaaagaagtatgacacataattgtgacctaaagcagattttttcataaacatcccagagtatatgcactagaataaaagaaaaaacaagttacagtcatttgatcaagtgcctataacatggctgctttacatgagttatgccatttgaccatcataatcctataggaaagattcatatgtggataggaatttaagggctcagagagatggagtgactttgcttcagtcttttaactttaagttccttattctcttccaaaatgtactcaatagtggattatattgtttcagttaatttacttcacacaaaaggatagttctaaaataatgctctccaatataaagacaatgcagctcacaaatgtaagcgacatatgttctgttaaattcctagtagccacttttaaagaggtaaaaataaacaggcaaaattaattttaatatattttatttaatccactgtatctacagtttttcatttcaatatgtatttaatacaaaataattaaaaatatcttttacattatattctcatgctccatattcaaaatctggtgtctgtttacacttacagcgcctgtcaatttggactgaatcaatttctcagtagccatatgtggccagtggctactatattgacactggagttctaggacttcaaagagcagcagacttctgtccttatagatctcccactctagtgtgggatgcaagcaaacagggaatgccatatgaaaactatgaaagatagcatattttatgctatgggaatgcaaagaagtgcctactcagacgtaagtggtcaggaaggcttcttaaaggaagggaaattagctgggatgtacatgatgagtaggaactgggcaagggaagtagaggaggaagaggacattagacacaagaaattgcatgtgcaaaggccaaagcattagattatttgaatataggaaataattttggtaagactgaaagaatgtaacttggtcaatgtccacagagaaggaattcacaaagtggtaacaccatatagagagtcttgtaagctcagttaagaaatctaaattttatcctgaggattaaaaggatttattaaataattttaagtaagaattggcatgattaaaataaatgctaatttcagcactgctattttttaaagcatttttagaaacatgcagtggtgggtggggtggattgctcttatggacttgtgagagagaattgttctcatcgtctttcaaaagtgttgccttcagtgattttacactagaaggttgaaattttcatggtagaagtatttacactacagaaatcagcaacaacttcagacgaggattcctcatcttcatcctcaccgtacacatacctcaaagtaccagttggtaaacttttaccagcataccactgaaaatatgtgatatatttatttagaaactatcaatgggtctctaataatacttaattcatcaagtttaggtttgacttttggaaacaatttgtaggaaattgatcaaggattaagtcacatggtaccattttggcttaaggacaaactttgtaagtaggagacagagcatggcggttttgagcactgactcttgaaatagccatgggttcaaaccccagctctagtgtttgcaagtcatgtgacattacaccaattagttttcctctctggatttcaatttccacaaatgtaatatggcataaccttaaagactatctcataagattggtctaaggttatatctacaaagaacctacaacacaatgtggcatgtaataagtactatatgtgtttactgttattcttggtccagaaaaatgaaacttggtctggaaatatagtccaagtttccatgttcaagctttttaaaattttatttaaaatgacacattaattatattcaagcatggtagcaattaataactggaaacaagttcagtaagatgaatagttttaatgacttttatgatcagtcaaagtggccatgtagaattgacttcattcatgttattgaggtaaatgtaaatattgatgttacatgaatgaaaatggccttataaaataatttacagtaaatttacaatctttgcttttcttttgtaataaatttagttaagatgtgaattagaaataaagtattgctcggttatctgtcaaaataatattttgtaactgatcagtaaaatttagaattttaattatttaattaacacattattcatttcagtatatcttcttgtactctgtcatagtgatatggctagtgatgcttcatttgtatctaaaatgtaaaaaaatacttgtataatagcttgtattttttatgtattttatagttttaatctttgccatctgcttgctttagacaatgtttttcttatttctatgcacagaagtatcattaccatgccactgggattaccaaatagaggcaaaatcacaaaacctaatatgccaattatggagccctcttccatatttccaagttagagaatctgcttctaaagtgtaggaacaacagtagcaaccaaacagacctcaaacaaaatagctaaaattcatcccaagtaaaaggttatgctgtatctacagtgaaagtaatgtgctgagattatatctttttgtaatattttgtgtctcttggatggaatgagcatcttgtgatgtgcaaggcctgttgtttccacagtcatatcttctgggaaccagatgcaagtaagctgaatgagaattactgccgaaatccagatgatgatgctcatggaccctggtgctacacgggaaatccactcattccttgggattattgccctatttctcgttgtaagtacagttagggattggtgtcttgtgaaatattttaaatgtactacatttcatctaaaagttgtaaataatataggtggtctggcatttattcccaaatgaggaagctctccagagagcaacacacacaaatgtacacaacacacacacagacacaccacatggtctctctttctctctctccatctctcgtatagataagaagaaattttaacattttaatggagattctcttccctcagaagatttccattgggattccgaaagcattaattggccacagttctaatatgactgggctagaaagatctccccaccccccaataccaatactacctgttcagcttctgaatatagcagagctctcagcaaagttcccagcccactaaaaagccgtgagcagatctgaactagtggtacttctatttccttctcagttctttaatttaagactaaagaagagcctggagttttccacccagttatctgattcccagatggctttgttaaaaagatattagtgtataaagtaaaagttatataaaaaacatgtaatacatgtttgacatagttcatataaaatacatgtctggtataattcatattaaaaagtccctagatatcagtaagaaaaagatgtgagaattcaggagaaaaaagtagaaaataaatcttcaaaaatatagctaataaataaatgaaaagacattaaaacatattcgtaggaaaaaaatgtttaagacatgagaagtcacttctacctgtcaggttggcaaataaaatgattgtaaatatccagtattagtgaggacctgggtaatcagtctgtctcaattctatgctacttacagtgtgaattcaaaatcctgcttggaagttagtttgataaaatgtatcaaaagcagtaataatgttgacatagatcaggatttttgggcctccgcacacccacattttggggtagatgctgttctgtgcattgtagcatgtttagtagtattcctggactctatccactagatgccagtagcatgacacctgccccaagtcgtgacaatcaaaactatctctagacattgccaatgtcccctggagggcaaaatcatttccactggtaaccactgatgtctagtaatacgtattgagatggaagtacgtcttaaatatgttattgagtgaaaaagcctttttataaagctgtgtcagtagaaagagaccattttactatactatgtatctgtaactctatgtttacaacgaacatcctttaccacaatgttaaaccaccttctctttagaaaggaaatacttttataagttcgataaaaactttgttttaagaatgtttttcttgtgagacaagctagtagtagcaagtaccttgagaacagcagcaaaaatatctactctaaaaagagattaaattgaagaaataataatgttgcttttaaaaaatgaaatacaacagaagtctgtgtttttctagaatttatgtcaaattaaagaggtaaatttcaccttaaatggaaacagcagtcatgttttatgaaattctagcattaaaggcaaacttttaaaatatgatgttaatcaagtctacctataattaagacttggagctgctccatctatttttaataggttgggaaactctgtataataataaataactaaatatattatatgtttgcaaataaatggcatttctaataagtttattttcattttatcagccatgatcatagcctttcaaattaatttgttttcctaatgttcttcacttttcccatattaaggttggcataggctcaatgttaatactaaaagaaacacacctactttttcagagaatgccatacaaaaatatttaaaaattattaaaagattattatttttctaagtacagttttatagcactatgtttttgttaagtctctatggttaagactaatggaggctcatagaatatataatggtgtaggaagaaggaaaaaggcaattatctgccttctaaaacaagttattttgcttcctctacagatttccagatttttaaaaatcacagcagctctatctagcacatatgcatggttaagagtgaaatgccctatagtatctcaaggcactgtgatttcatttataatcacaaaccaagggagccaggactctaataatttacaagttttcaaaaaattttttcaactaatatttttaaactaaaagtaatgtgctgttgaaagacttgagggggttactagtatttgattaaatactattgcagataaatcattttatttcaatgtataccacaaattaattttaataaagatttttacagtgtcatttttctaactaatatttatagccaggatttgtttacattttctccctggtgaaagggtgataatatttatctttagaagatttgagttcttattatttatataactgcagagactgtataaatcattttcacactgtaaaattcttttacaaaacatgtaaaggtttttattcttttttttaacatgcttacaaaataatattttacatatttttaagtttatcaaatatgcaaacataaaaatgtagaggtgcctatatgattgagtatacacagacacagttagtatactattttagaaaaatcttaactaccaagagcgtagtggttaagaacttcaatccagacttcctaagaatgccagacccatcacttttaagtaccttgggcaagttaccaaacccacttaggactcatatttgtatttgcaatattttataataaaagtacctattatatgggactattgtgaacagtgtctgttgcatagtaaagagtcaaaaccttaacttccatctctgtttttatttgttcattcattattgttaattgagctgctattgtgtacaaagccatatataacatactatgtttataaaaatacaaacacttcttcttaattttaaatagttcatagtatagaagggagacatttatggaaataattacaaagcaatataatcatgtaatatgtatatattaacaatatataaaatgagaatgtgaacatcgatttcttcatggagaaatacatgatgttcgtaaacttttgaaattgagttaaagctttaagaagagtgggagaaagttttctttatgttttcagaaaaagtccatgtttggttctgaggccatacacacacacacacacacacacacacacacacacacacacgcacacacacccctacccttccgtaggtaaaacttttatcattgacatgttttctttcttcaaatttaagttgaaccaataaaaaataagtattgtatcacatatatttttgtagacatgagtctgaaagtagtgtggtatagatagtgtagtatagacagtggtgaaagtaaaggaagaaaagtgagaatagtatttggcagtgaaatggaaaaggcatagaaagtagtttttcaagttttactccaggcatgcaacagaagaacctaggatgcttgttaaatggatgcatccggccaccaacccagaatccccagaaatttaattttaaaacgtatttcagtttatgctaaagtgtgagaaatactggattagagaaagcaaaacatatacattactattaattattaaaacccaaaatgtatagtgtctacaaatttttttttttttttgagacagagtatcacactgctgcccacactgttgcccaggctggagtgcagtggagcaatttcggctcactgcaaactctgcctcccaggtttaagcgattctcctgcctcagcctcccaaggagctgggattacaggtgtctgccaccacacctggctgattttttgtatttttagtagatccaggttttcactgtgttggccagactggtcttgaactcctgaccttgtgatccatccgcctcggcctcccagaatgctgggattacaggcaggcacgagccaccacgcaaggccatatctacaaatttttaaaactaaatatattgtaagatacaagagttaactaagcattttgttgacctattagcttaatgcttagaaataagagacttaatatacaagatagaacaaataaccagtctttctcctcacaaaataagaaataaatatctacttatttaacattttcaagtatttgacttacgtggaaaaccaatatccttgaagttttgttaccatagtccgcctcaatcttaactcatacttaatgaactaaaactctgacctcagctgactgacaaaccctcctctaggataagctacagggaaagagaaatgatgaattttgtatgtttaccattaacctattcatttaaaatatctagatctgaaaaatgaacttaaataagtatatattaattctcacaactatcctcataaataacaatcacattggcatctattacaaaggaatccatatacattattggtttgttgctggcttatttgagctcagggcatttccagggattgacaaccatctgggtctaaacagtgcctgactgaactctatgccatcaattctgaatagtcacacattaagctccaggaaatgtcttgtgtctcattcattacagcataagtatttcaaaatccttgcatcttccaagactttctcttatttgtggcaattaagccccagtagagatgaaaaagtagtaagctacaggttttaattagaattaatttgtagttttcagtgttctcttttttccatatttttttactcgcatctggaaaaatcaacccttgaaatattcaagcaacaaagcataattatattgtattattcctctttttccattagtgacattgatatctatcttctagaatccttgcagagatttatgaagttggtgtagttgcaattatctttaaccatataaaactaaaagttttcagaaaaaaaattaaatgattcaaattacagaagcaaatggcctatcaatatgaagagtccaagtagacaataatgaacacgagtgctattcaatggaatgttcatggtgtaggatgttggacatcttggtggatcgaggcagctccttgatgaaggcaatgtaattcaaatggccaatgatcatcaaaacacacacctgagagcctccacagtcataaaatagggctctgctcatatcacctagtaccagagggcatatacttacaatattatccagtaaacgtgatgtataattactcaaaagagtttacattttatctctgaataaaatgtcaagaatttcagtaaattggccaggtgtggtggctcatgcctataatcctagcactttgggaggctgaggcaggtggatcatttgaggtcaggagtttgagaccagcctggcccacatggcgaaatcccgtctctactaaaaatacaaaaagtagctgggtgtggtggtgtgtgcctgtggttccagctacttgggaggctgagtcaggagaatcgcttgaacctgagagggggaggttgcagtgagctgagatagcaccactggactccagcctgggtgacagaatgagactctgtctcaaaacaaaacaaaacaacaacaacaaaaattttagtaaattactgaattcattgatacttggattttaatatatatttggttttatataacagatatatgcatatatgaattgtgtatttatctatacatttatttttacaggtgaaggtgataccacacctacaatagtcaatttagaccgtaagtaatatttcacaatataaagtatattctgagtctctctctgtgtgtcagaagtgtcattatttctttcaaagaaaattatctatattagcttccattataaaaagaagttaatctatttatttttactttttaaaatatatttttctatgcataggtgtaaaggagtttcaaaggcaactgcatactgaatataaaaattcaattctcttgcaaaaaatctataagatggtatatgtgatttcgaaaagagtgtttatatttacttttaatttggggcacaatgcgtataatggaccacctttatatataccatgatttaataaaattaggatgctgaattcaggagaatgaaacctgaaagttggaaagttattcagtgcctctattctactctatttgtaaacttctctgcatgccctacagtcaagtgggcacaagatgacacagtctatgatattcagttaatcctcagtttaagaatctgttgggggccacttgtattttattttcacatatctcttgagctgaaggaagttactcaagtgtttttgatttagaataccacctgctgtgccccaggctcaggaagcaaatggatatctattctagaccatgggcagaagtagaggggataaggcgaggagcacagaggagggtcaggaaaacatttactccaataaattttatattatgtctttggacataatgatttgaaaataataattatatcatttggatatgatttcaataaatcaaatgttggtaagacatattgaataaatctacaatctaactgtacaaattcagaagtaatatccaagtaaagcttggttttgtttttttcactgaatctattgatttctactgaccattagaaataaccattgtaaataactttggtttattttatgttgagggtggtgagggattagacctgaggagcttggtcttagtgtattgtgagcaaagccattgtcactctcatggcaatcctgtctgctttgagtttatttgtttttctgagttactcaacttcttagatgaagatggcaagtgttaaggacttaatataatgctgcggtcatattaaacttctctttcaccaaactgttctttggacacaataagaatagttacatttgtgtaattatcattgcatttaagaaaactaagaggcactgattatttcaaattcttattttaaaaaatgttatgtttggtcctgtttcagatcccgtaatatcttgtgccaaaacgaaacaattgcgagttgtaaatgggattccaacacgaacaaacataggatggatggttagtttgagatacaggtaattattaatagatgcaagtcatgcatatccagaatatgtacaagagagtcctattcccagaaatatggacacatgtggtcctgaaggttgtaccctccacagggcacctgggtgaggcagtaaaagaggaagctgatcacatctgcttgccagactgtaagctctggactataatttgtgcctccagaggtagtgcctttttaaatcttcacaaaggtcccatatgtgttggcaatgtccctgattctaagagacactttggttccgattaagcaaaatacggaggacctattgaaaccttaatattaccatagtagttatgatacttgttattaaatttccaatctaggatattatgggtttattttctaatatgtttatgcatgatcatgtcaaaacatttatatttgtttttaatttctgactttttccttgtcaatcaaatgaaaaatggtaattttaaattctagagcattttatctttacaaaaaggccaatagttaaatagtcttgatattataataatcagtggggatacaaaattcttgacatgtctatttctcaatgctcttaagaatcaatgacatattctacataaaatcactttgcaaatcatattgttagagaaaattatgcttaataattatgtcataagaattaaatactgaaaatataagttaacttaaaatctgatcttacaactttcatatactacatatattattctgtatgttaattggaatgctaaaatatttatgtctttggctatctctatcagaaccttaccatgcaacacaccccaagatacattgaatttgaaccacattgtctcttgttttctagatacctcacgtttcttcctctaagcctttatgctgttgttcccacaacacactgtggctttcttcctccatgttttatgcctgaaaattccttctccttcaaatttcaacctaaatatcccctcttttagaataccctcctgttcccttaccgctagcctcctagagtagagaaaaagaatgtctgttactattattaaatcacagtgacattagaatagagacaacttgaaacagaagtccttttatgaataaaccaattattggaaagcaagagtttatataatttgatatatatgactttagatgaccacaatgttgtaggagatggcctaaagttctttttttagtatacccttttctcaaggaatggcttatcagattttataaatatttatgccaataattgtagtatagctgtcctaggtgtgtagtactaaaatagaattgtgaaactaaccagaatattaaagctgagtgtgcagtatgaggatttagtaaagactttagaattctgttggagtgtttaattttcttaattatagaaaatctttcaagaggctgggtgtggtggctcacacctgtaatcccagcagtttgggaggctgaggcaggtgtatcacttgaggtcaggagttcaagagcagcctggccaacgtggtaaaacccatctctactaaaaatacaaaaattagccgggcatggtggcacatgcctgtaatcccagctactgagcgagactctgtctcaaaaaaaaaaaaaaaaaaaaaaaaaaaagaaggaaggaaggagaaatctttcaataatccacatttgagttaattggtgattctttgcttatcttataaccccagaggataaaagaagacatatattaatacttctaagttattttttccagtaagagaattcacaaggatactgctttggtcatctccattgttggaaaagcaggtgaagctatttttccatcagattagagtactgtaaatttttagtttttttcctttttaaatccaagttcttagcaacaacagctgcttagttattcttccaaaactcatactgaaaaggatagaaattaaaagtcaatatatattcttatcctcctgtgtggtaaaggccataaataactgtggtctcagtctgggaatcttctagtattaccctctgaagcactgaacatctgtactctttggaaatgtaaattatgaaaagttgtgctttttccatgtctctgccaaaaaaaatggatttacagattttggatatcatcaaaaaaatgtactagtactcatcatactctgcaaatattttacaatttcctaaatgatttgccttgcaaaattgttttactttagagatgaaatattatattcctgatcttatactggacaaagtaatttattcagattcagttacattttatgttaatatatcaaaactacataatggtagtagaagaaggaaatagtgcacgaataaaattgctaccactagatggttttcagggttcaaacaagaactcaactttgcatttttaataagcaaacactgaatttaaaatagattcacatttttaagaaattataattatcctatatttgtagcacatacgttcctcacaaggatagatgcacatacacacgaatatgtgtgttcgggatggctattgatgtgtaataactttagactacacaaaagtcaaattgatttcataaatttatagtcacattatgaaaaaaaagctaacgctacaatcaccaaatatcacccttcagataaaagaacttctcattttattccagttgggttaatttctatattttcctctgcagtgtatttatttttaacaaatggagccacaggctttgcattaattggcagtcactctttctgcacagatgttacttgtttctctttcctctttttcacagaaataaacatatctgcggaggatcattgataaaggagagttgggttcttactgcacgacagtgtttcccttctcggtaaagtgtttttaaaactagtattattttgagcctttaaaatgtgtatgtcttccactttgctcttaaggttataatatgtattcattttacagagattcacaaatggggtgaacaaattatttcatttttagaatttggcttacaaaacttactttgacttcacagatatttacaagacactacttcagttcacctcttttcacaattagtgttaccctcagttggggaaaattttgctagaattatgtaaatgttttatatcccaactttctacttgtaccctgtatttctagatataattcttttttttttctaaattgtcaataggcttttttcagtcctcactacttctttctcctgtagagtcagcctcaggatcatcctgggcataattttcaatgaaaattagcctaaggaaaagataaagaggcagcatttgtaaacttccttcctgcttctcagcaaggtcactttgattttgtttgtagaaaacttcaacccctgttaccaaaccaaatatatacacagctgacataaacaaagcaaaatttgcagaaaaaattataattcatgtaaagtgctttacctgagcatttttcacaagtgacttctagcaagcataagcaagtttctaaaatagtcatttagaatctcagcaatttaaagcctctttctgcttatgtatgtttgtagtattcagaatctgccataacaaatgtgttgttctttattatactatgaatcaaattttaaatttaggttatgtgccttaatagtctaaaataacaatagataggaataatactacagaatttggaattattatgttttacatttaaatttttttccttcaaaacagagacttgaaagattatgaagcttggcttggaattcatgatgtccacggaagaggagatgagaaatgcaaacaggttctcaatgtttcccagctggtatatggccctgaaggatcagatctggttttaatgaagcttgccaggttagttactttagaagattttgtatttttcacctggacaagaattgttggagcattttcttcagctgtgtggcagttcgttctctctcatacagatgcattataaacatatgttacatgctgtatatatatgtatatatgcgtgcgtttgggtctctctgtgagtatagagagaaaggtatttgcaaaactgtaaaaaaatgaataactaacattgggccaacagtctgatcagtctgttttaaaatggaaactcagcagttatttgataactttcaaatgtaaaataattattttaaaaaatagcattgaccatttattcttaaatattggcaaatacatgactcatttctttactacctattccaaatgtcatcattacatttggacattcccacctttttttttttttttttaagaaacaggacttcattctctgtaaatgccatattaaacatgaacactacatttaatatgttaattttgtgttgaatccagttgagagtacttaccattgtattttgtgttttcaggcctgctgtcctggatgattttgttagtacgattgatttacctaattatggatgcacaattcctgaaaagaccagttgcagtgtttatggctggggctacactggatgtaagctagttttcaaaagatgaggccatatttattttattttaaaaagaacacatttgtctttgtttcttacttttctcaccttattgtatgttttttgcatcaatctagtgatcaactatgatggcctattacgagtggcacatctctatataatgggaaatgagaaatgcagccagcatcatcgagggaaggtgactctgaatgagtctgaaatatgtgctggggctgaaaagattggatcaggaccatgtgaggtaaaaaggaagttctttaataaggagtatgtgattcatagcttagtgtttcatgtttatttttttctgtttatttttctcaaatcaaaaatattgtataccaacctattctaggaaagaggaattgggaaaattaactctgtaatattctgcatttctttcaactaagcagtgagataatcaatgttttattagcagcaaactatgatgacatttgtcactcaaaaaataataagtgtgtagagccggaactccaagggagagctattcaaatgagaagtatccaaatcagttagatcaatggtttgcatttttctaatgtttttctaaatttattttatcttcccaaattatctcgaagtgaactccactaattatatcattcagagatgcctggctttaaacttttaaatctctttttgggtaagctgttccctcttttgctctctcgctctgtgtatgtgtttaaacagattctattttaaaaagcctaaaggtcaaagtttgtgactttacgagcttggacatttcatttgtgaggcaactgttatttcggcttggcaatgttcctatccctattttacatagacaagctgttaaactgttagtttagttagattttgaatgtgagagacatgttctccaagcttcagggctgtgggattgtggaatgctgtgtgtggcaaaagatgaaatgagttcaatgatagtgaaatgtcctttgatatgtaggaaaatgcatgctgtaagtatggaacataaatatgtattgaaatgcaagtgttatacaccttgctctgagattttatttctgaaaagaagagaaaatgtttactgtttactgagtttttagaactgcttaaaaatgatatggttagaaacagattatatgtttataaccagtttcaaatttgttgcctttctagtaaatcatgaacaatgaaaccattgttcattataacaagggaacatttactaggagaaataaatgactatactttaaaaagaaaaagcaataagcatccgggaaacacagaagtttctaactagacccaaccttacagatcatctaattattgtcattaccaaaaccaatttgacaactgcttttgaagaatagcctttaatttggattatcacctatatatttttcacttccctcttcagtttgaattattcatatctgtatactatatatgttgtttttaactttattgataagacttgacctcaagtagattccgccacttctcaaaaatgtatttatcctccagaatgtttttaaaaatatatatgtcactgacatttaaatcaaggtaatttagccactgaaataaatttgaaggagatatctcccaaatgtttgtataatagcagtaacatcatatttagtgaaagtctccagagtgaattactttgaggagtttgtctcagtaatcactagtacatttgtttaaaaatcagttttctttcctcaactggcatagtttatatagtctcttggaataaactatttttctttactgtgtgaaattctactttacccctaacttggttttccccatcacagaatgccaatggctctcttctttccatttgaatcacataagttaattttgcagtggtttcccccatcgctgtttagggaaaattaaggtagttccaaacactcttctgcatataaagataccaaaagccagccactgcattctaaggaggctacatggttcatgaaagtggtgcagcacagttgtagttgttacatataacactatgtgcattgtttatttatatttacttattatatatttttatataattatatttatatgaataaataaaaccataaatgaatatatgcatgtatatatacacaacacaaataaagctatctgttcatctttcctctatctgatgatgcaacaggcttaccatataagaaatgccatgaaatcacaggacacgctacagaaaggagggtataaaatataactataactatattaactactaataccagcagtaactggaggaatattccttgcctggaaaagcaatttcaattaacagaattattttgttgacaacaagttttttatttaacttgttaagatcatgtagggcaggattgggagaggcaaaaaaaaaaagctttagaaataagaaaaaatataatgcagtttaattgttaaaactatatgattacaagttattttcttttatacttgtatttttctacatgttccaaatttcctatattgaacataagaagatcaaaataaatatcaaatctaccttattaaataggcaccgatggttatatgttagtctgcatccaacaaaggcaaagcacacttaaaaggatggttgactcttttggaaaaggcaagtcatttttaggagaataccacacataatagaacactttaaactttgtacttatctcagtcttggctaattcagtagaaagtcaacaaatgtctagtacactaatttttatatcttcatatttcagttgcagttattctctttttctgtatatatctctgagatgcaaatctatatatgattatgttaatgagcttttttttaattcctaataatactttgtttttgtatgtcttactcctagggggattatggtggcccacttgtttgtgagcaacataaaatgagaatggttcttggtgtcattgttcctggtcgtggatgtgccattccaaatcgtcctggtatttttgtccgagtagcatattatgcaaaatggatacacaaaattattttaacatataaggtaccacagtcatagctgaagtaagtgtgtctgaagcacccaccaatacaactgtcttttacatgaagatttcagagaatgtggaatttaaaatgtcacttacaacaatcctaagacaactactggagagtcatgtttgttgaaattctcattaatgtttatgggtgttttctgttgttttgtttgtcagtgttattttgtcaatgttgaagtgaattaaggtacatgcaagtgtaataacatatctcctgaagatacttgaatggattaaaaaaacacacaggtatatttgctggatgataaagatttcatgggaaaaaaaatcaattaatctgtctaagctgctttctgatgttggtttcttaataatgagtaaaccacaaattaaatgttattttaacctcaccaaaacaatttataccttgtgtccctaaattgtagccctatattaaattatattacatttca

SEQ ID NO: 2 - DNA, 2820 bp, Homo sapiens
  HGF
gggagttcagacctagatctttccagttaatcacacaacaaacttagctcatcgcaataaaaagcagctcagagccgactggctcttttaggcactgactccgaacaggattctttcacccaggcatctcctccagagggatccgccagcccgtccagcagcaccatgtgggtgaccaaactcctgccagccctgctgctgcagcatgtcctcctgcatctcctcctgctccccatcgccatcccctatgcagagggacaaaggaaaagaagaaatacaattcatgaattcaaaaaatcagcaaagactaccctaatcaaaatagatccagcactgaagataaaaaccaaaaaagtgaatactgcagaccaatgtgctaatagatgtactaggaataaaggacttccattcacttgcaaggcttttgtttttgataaagcaagaaaacaatgcctctggttccccttcaatagcatgtcaagtggagtgaaaaaagaatttggccatgaatttgacctctatgaaaacaaagactacattagaaactgcatcattggtaaaggacgcagctacaagggaacagtatctatcactaagagtggcatcaaatgtcagccctggagttccatgataccacacgaacacagctttttgccttcgagctatcggggtaaagacctacaggaaaactactgtcgaaatcctcgaggggaagaagggggaccctggtgtttcacaagcaatccagaggtacgctacgaagtctgtgacattcctcagtgttcagaagttgaatgcatgacctgcaatggggagagttatcgaggtctcatggatcatacagaatcaggcaagatttgtcagcgctgggatcatcagacaccacaccggcacaaattcttgcctgaaagatatcccgacaagggctttgatgataattattgccgcaatcccgatggccagccgaggccatggtgctatactcttgaccctcacacccgctgggagtactgtgcaattaaaacatgcgctgacaatactatgaatgacactgatgttcctttggaaacaactgaatgcatccaaggtcaaggagaaggctacaggggcactgtcaataccatttggaatggaattccatgtcagcgttgggattctcagtatcctcacgagcatgacatgactcctgaaaatttcaagtgcaaggacctacgagaaaattactgccgaaatccagatgggtctgaatcaccctggtgttttaccactgatccaaacatccgagttggctactgctcccaaattccaaactgtgatatgtcacatggacaagattgttatcgtgggaatggcaaaaattatatgggcaacttatcccaaacaagatctggactaacatgttcaatgtgggacaagaacatggaagacttacatcgtcatatcttctgggaaccagatgcaagtaagctgaatgagaattactgccgaaatccagatgatgatgctcatggaccctggtgctacacgggaaatccactcattccttgggattattgccctatttctcgttgtgaaggtgataccacacctacaatagtcaatttagaccatcccgtaatatcttgtgccaaaacgaaacaattgcgagttgtaaatgggattccaacacgaacaaacataggatggatggttagtttgagatacagaaataaacatatctgcggaggatcattgataaaggagagttgggttcttactgcacgacagtgtttcccttctcgagacttgaaagattatgaagcttggcttggaattcatgatgtccacggaagaggagatgagaaatgcaaacaggttctcaatgtttcccagctggtatatggccctgaaggatcagatctggttttaatgaagcttgccaggcctgctgtcctggatgattttgttagtacgattgatttacctaattatggatgcacaattcctgaaaagaccagttgcagtgtttatggctggggctacactggattgatcaactatgatggcctattacgagtggcacatctctatataatgggaaatgagaaatgcagccagcatcatcgagggaaggtgactctgaatgagtctgaaatatgtgctggggctgaaaagattggatcaggaccatgtgagggggattatggtggcccacttgtttgtgagcaacataaaatgagaatggttcttggtgtcattgttcctggtcgtggatgtgccattccaaatcgtcctggtatttttgtccgagtagcatattatgcaaaatggatacacaaaattattttaacatataaggtaccacagtcatagctgaagtaagtgtgtctgaagcacccaccaatacaactgtcttttacatgaagatttcagagaatgtggaatttaaaatgtcacttacaacaatcctaagacaactactggagagtcatgtttgttgaaattctcattaatgtttatgggtgttttctgttgttttgtttgtcagtgttattttgtcaatgttgaagtgaattaaggtacatgcaagtgtaataacatatctcctgaagatacttgaatggattaaaaaaacacacaggtatatttgctggatgataaagatttcatgggaaaaaaaatcaattaatctgtctaagctgctttctgatgttggtttcttaataatgagtaaaccacaaattaaatgttattttaacctcaccaaaacaatttataccttgtgtccctaaattgtagccctatattaaattatattacatttcaaaaaaaaaaaaaaaa

SEQ ID NO: 3 - protein, 728 aa, Homo sapiens
  HGF
MWVTKLLPALLLQHVLLHLLLLPIAIPYAEGQRKRRNTIHEFKKSAKTTLIKIDPALKIKTKKVNTADQCANRCTRNKGLPFTCKAFVFDKARKQCLWFPFNSMSSGVKKEFGHEFDLYENKDYIRNCIIGKGRSYKGTVSITKSGIKCQPWSSMIPHEHSFLPSSYRGKDLQENYCRNPRGEEGGPWCFTSNPEVRYEVCDIPQCSEVECMTCNGESYRGLMDHTESGKICQRWDHQTPHRHKFLPERYPDKGFDDNYCRNPDGQPRPWCYTLDPHTRWEYCAIKTCADNTMNDTDVPLETTECIQGQGEGYRGTVNTIWNGIPCQRWDSQYPHEHDMTPENFKCKDLRENYCRNPDGSESPWCFTTDPNIRVGYCSQIPNCDMSHGQDCYRGNGKNYMGNLSQTRSGLTCSMWDKNMEDLHRHIFWEPDASKLNENYCRNPDDDAHGPWCYTGNPLIPWDYCPISRCEGDTTPTIVNLDHPVISCAKTKQLRVVNGIPTRTNIGWMVSLRYRNKHICGGSLIKESWVLTARQCFPSRDLKDYEAWLGIHDVHGRGDEKCKQVLNVSQLVYGPEGSDLVLMKLARPAVLDDFVSTIDLPNYGCTIPEKTSCSVYGWGYTGLINYDGLLRVAHLYIMGNEKCSQHHRGKVTLNESEICAGAEKIGSGPCEGDYGGPLVCEQHKMRMVLGVIVPGRGCAIPNRPGIFVRVAYYAKWIHKIILTYKVPQS

SEQ ID NO: 4 - DNA, 20 bp, Artificial Sequence
  Primer HGF_F1
aggattctttcacccaggca

SEQ ID NO: 5 - DNA, 21 bp, Artificial Sequence
  Primer HGF_intron11R1
gaataaatgccagaccaccta

SEQ ID NO: 6 - DNA, 20 bp, Artificial Sequence
  Primer HGF_F2
accatgtgggtgaccaaact

SEQ ID NO: 7 - DNA, 23 bp, Artificial Sequence
  Primer HGF_intron11R2
tcacaagacaccaatccctaact

SEQ ID NO: 8 - DNA, 25 bp, Artificial Sequence
  Primer HGF_intron13R2
tccatatttctgggaataggaggac

SEQ ID NO: 9 - DNA, 1471 bp, Homo sapiens
  SR023A02
cccaggcatctcctccagagggatccgccagcccgtccagcagcaccatgtgggtgaccaaactcctgccagccctgctgctgcagcatgtcctcctgcatctcctcctgctccccatcgccatcccctatgcagagggacaaaggaaaagaagaaatacaattcatgaattcaaaaaatcagcaaagactaccctaatcaaaatagatccagcactgaagataaaaaccaaaaaagtgaatactgcagaccaatgtgctaatagatgtactaggaataaaggacttccactcacttgcaaggcttttgtttttgataaagcaagaaaacaatgcctctggttccccttcaatagcatgtcaagtggagtgaaaaaagaatttggccatgaatttgacctctatgaaaacaaagactacattagaaactgcatcattggtaaaggacgcagctacaagggaacagtatctatcactaagagtggcatcaaatgtcagccctggagttccatgataccacacgaacacagctatcggggtaaagacctacaggaaaactactgtcgaaatcctcgaggggaagaagggggaccctggtgtttcacaagcaatccagaggtacgctacgaagtctgtgacattcctcagtgttcagaagttgaatgcatgacctgcaatggggagagttatcgaggtctcatggatcatacagaatcaggcaagatttgtcagcgctgggatcatcagacaccacaccggcacaaattcttgcctgaaagatatcccgacaagggctttgatgataattattgccgcaatcccgatggccagccgaggccatggtgctatactcttgaccctcacacccgctgggagtactgtgcaattaaaacatgcgctgacaatactatgaatgacactgatgttcctttggaaacaactgaatgcatccaaggtcaaggagaaggctacaggggcactgtcaataccatttggaatggaatttcatgtcagcgttgggattctcagtatcctcacgagcatgacatgactcctgaaaatttcaagtgcaaggacctacgagaaaattactgccgaaatccagatgggtctgaatcaccctggtgttttaccactgatccaaacatccgagttggctactgctcccaaattccaaactgtgatatgtcacatggacaagattgttatcgtgggaatggcaaaaattatatgggcaacttatcccaaacaagatctggactaacatgttcaatgtgggacaagaacatggaagacttacatcgtcatatcttctgggaaccagatgcaagtaagctgaatgagaattactgccgaaatccagatgatgatgctcatggaccctggtgctacacgggaaatccactcattccttgggattattgccctatttctcgttgtaagtacagttagggattggtgtcttgtgaaat

SEQ ID NO: 10 - protein, 467 aa, Homo sapiens
  SR023A02
MWVTKLLPALLLQHVLLHLLLLPIAIPYAEGQRKRRNTIHEFKKSAKTTLIKIDPALKIKTKKVNTADQCANRCTRNKGLPLTCKAFVFDKARKQCLWFPFNSMSSGVKKEFGHEFDLYENKDYIRNCIIGKGRSYKGTVSITKSGIKCQPWSSMIPHEHSYRGKDLQENYCRNPRGEEGGPWCFTSNPEVRYEVCDIPQCSEVECMTCNGESYRGLMDHTESGKICQRWDHQTPHRHKFLPERYPDKGFDDNYCRNPDGQPRPWCYTLDPHTRWEYCAIKTCADNTMNDTDVPLETTECIQGQGEGYRGTVNTIWNGISCQRWDSQYPHEHDMTPENFKCKDLRENYCRNPDGSESPWCFTTDPNIRVGYCSQIPNCDMSHGQDCYRGNGKNYMGNLSQTRSGLTCSMWDKNMEDLHRHIFWEPDASKLNENYCRNPDDDAHGPWCYTGNPLIPWDYCPISRCKYS

SEQ ID NO: 11 - DNA, 1495 bp, Homo sapiens
  SR023A08
attctttcacccaggcatctcctccagagggatccgccagcccgtccagcagcaccatgtgggtgaccaaactcctgccagccctgctgctgcagcatgtcctcctgcatctcctcctgctccccatcgccatcccctatgcagagggacaaaggaaaagaagaaatacaattcatgaattcaaaaaatcagcaaagactaccctaatcaaaatagatccagcactgaagataaaaaccaaaaaagtgaatactgcagaccaatgtgctaatagatgtactaggaataaaggacttccattcacttgcaaggcttttgtttttgataaagcaagaaaacaatgcctctggttccccttcaatagcatgtcaagtggagtgaaaaaagaatttggccatgaatttgacctctatgaaaacaaagactacattagaaactgcatcattggtaaaggacgcagctacaagggaacagtatctatcactaagagtggcatcaaatgtcagccctggagttccatgataccacacgaacacagctttttgccttcgagctatcggggtaaagacctacaggaaaactactgtcgaaatcctcgaggggaagaagggggaccctggtgtttcacaagcaatccagaggtacgctacgaagtctgtgacattcctcagtgttcagaagttgaatgcatgacctgcaatggggagagttatcgaggtctcatggatcatacagaatcaggcaagatttgtcagcgctgggatcatcagacaccacaccggcacaaattcttgcctgaaagatatcccgacaagggctttgatgataattattgccgcaatcccgatggccagccgaggccatggtgctatactcttgaccctcacacccgctgggagtactgtgcaattaaaacatgcgctgacaatactatgaatgacactgatgttcctttggaaacaactaaatgcatccaaggtcaaggagaaggctacaggggcactgtcaataccatttggaatggaattccatgtcagcgttgggattctcagtatcctcacgagcatgacatgactcctgaaaatttcaagtgcaaggacctacgagaaaattactgccgaaatccagatgggtctgaatcaccctggtgttttaccactgatccaaacatccgagttggctactgctcccaaattccaaactgtgatatgtcacatggacaagattgttatcgtgggaatggcaaaaattatatgggcaacttatcccaaacaagatctggactaacatgttcaatgtgggacaagaacatggaagacttacatcgtcatatcttctgggaaccagatgcaagtaagctgaatgagaattactgccgaaatccagatgatgatgctcatggaccctggtgctacacgggaaatccactcattccttgggattattgccctatttctcgttgtaagtacagttagggattggtgtcttgtgaaat

SEQ ID NO: 12 - protein, 472 aa, Homo sapiens
  SR023A08
MWVTKLLPALLLQHVLLHLLLLPIAIPYAEGQRKRRNTIHEFKKSAKTTLIKIDPALKIKTKKVNTADQCANRCTRNKGLPFTCKAFVFDKARKQCLWFPFNSMSSGVKKEFGHEFDLYENKDYIRNCIIGKGRSYKGTVSITKSGIKCQPWSSMIPHEHSFLPSSYRGKDLQENYCRNPRGEEGGPWCFTSNPEVRYEVCDIPQCSEVECMTCNGESYRGLMDHTESGKICQRWDHQTPHRHKFLPERYPDKGFDDNYCRNPDGQPRPWCYTLDPHTRWEYCAIKTCADNTMNDTDVPLETTKCIQGQGEGYRGTVNTIWNGIPCQRWDSQYPHEHDMTPENFKCKDLRENYCRNPDGSESPWCFTTDPNIRVGYCSQIPNCDMSHGQDCYRGNGKNYMGNLSQTRSGLTCSMWDKNMEDLHRHIFWEPDASKLNENYCRNPDDDAHGPWCYTGNPLIPWDYCPISRCKYS

SEQ ID NO: 13 - DNA, 1613 bp, Homo sapiens
  SR023E09
agcaccatgtgggtgaccaaactcctgccagccctgctgctgcagcatgtcctcctgcatctcctcctgctccccatcgccatcccctatgcagagggacaaaggaaaagaagaaatacaattcatgaattcaaaaaatcagcaaagactaccctaatcaaaatagatccagcactgaagataaaaaccaaaaaagtgaatactgcagaccaatgtgctaatagatgtactaggaataaaggacttccattcacttgcaaggcttttgtttttgataaagcaagaaaacaatgcctctggttccccttcaatagcatgtcaagtggagtgaaaaaagaatttggccatgaatttgacctctatgaaaacaaagactacattagaaactgcatcattggtaaaggacgcagctacaagggaacagtatctatcactaagagtggcatcaaatgtcagccctggagttccatgataccacacgaacacagctttttgccttcgagctatcggggtaaagacctacaggaaaactactgtcgaaatcctcgaggggaagaagggggaccctggtgtttcacaagcaatccagaggtacgctacgaagtctgtgacattcctcagtgttcagaagttgaatgcatgacctgcaatggggagagttatcgaggtctcatggatcatacagaatcaggcaagatttgtcagcgctgggatcatcagacaccacaccggcacaaattcttgcctgaaagatatcccgacaagggctttgatgataattattgccgcaatcccgatggccagccgaggccatggtgctatactcttgaccctcacacccgctgggagtactgtgcaattaaaacatgcgctgacaatactatgaatgacactgatgttcctttggaaacaactgaatgcatccaaggtcaaggagaaggctacaggggcactgtcaataccatttggaatggaattccatgtcagcgttgggattctcagtatcctcacgagcatgacatgactcctgaaaatttcaagtgcaaggacctacgagaaaattactgccgaaatccagatgggtctgaatcaccctggtgttttaccactgatccaaacatccgagttggctactgctcccaaattccaaactgtgatatgtcacatggacaagattgttatcgtgggaatggcaaaaattatatgggcaacttatcccaaacaagatctggactaacatgttcaatgtgggacaagaacatggaagacttacatcgtcatatcttctgggaaccagatgcaagtaagctgaatgagaattactgccgaaatccagatgatgatgctcatggaccctggtgctacacgggaaatccactcattccttgggattattgccctatttctcgttgtgaaggtgataccacacctacaatagtcaatttagaccatcccgtaatatcttgtgccaaaacgaaacaattgcgagttgtaaatgggattccaacacgaacaaacataggatggatggttagtttgagatacaggtaattattaatagatgcaagtcatgcatatccagaatatgtacaagagagtcctattcccagaaa

SEQ ID NO: 14 - protein, 514 aa, Homo sapiens
  SR023E09
MWVTKLLPALLLQHVLLHLLLLPIAIPYAEGQRKRRNTIHEFKKSAKTTLIKIDPALKIKTKKVNTADQCANRCTRNKGLPFTCKAFVFDKARKQCLWFPFNSMSSGVKKEFGHEFDLYENKDYIRNCIIGKGRSYKGTVSITKSGIKCQPWSSMIPHEHSFLPSSYRGKDLQENYCRNPRGEEGGPWCFTSNPEVRYEVCDIPQCSEVECMTCNGESYRGLMDHTESGKICQRWDHQTPHRHKFLPERYPDKGFDDNYCRNPDGQPRPWCYTLDPHTRWEYCAIKTCADNTMNDTDVPLETTECIQGQGEGYRGTVNTIWNGIPCQRWDSQYPHEHDMTPENFKCKDLRENYCRNPDGSESPWCFTTDPNIRVGYCSQIPNCDMSHGQDCYRGNGKNYMGNLSQTRSGLTCSMWDKNMEDLHRHIFWEPDASKLNENYCRNPDDDAHGPWCYTGNPLIPWDYCPISRCEGDTTPTIVNLDHPVISCAKTKQLRVVNGIPTRTNIGWMVSLRYR

SEQ ID NO: 15 - DNA, 2820 bp, Homo sapiens
  allele 293: n = a or g
  allele 498: n = a or g
  allele 623: n = g or t
  allele 876: n = t or c
  allele 1075: n = g or a
  allele 1153: n = g or t
  allele 1256: n = g or a
  allele 409: n =  t or c
  allele 1138: n = c or t
  HGF allelic variants
gggagttcagacctagatctttccagttaatcacacaacaaacttagctcatcgcaataaaaagcagctcagagccgactggctcttttaggcactgactccgaacaggattctttcacccaggcatctcctccagagggatccgccagcccgtccagcagcaccatgtgggtgaccaaactcctgccagccctgctgctgcagcatgtcctcctgcatctcctcctgctccccatcgccatcccctatgcagagggacaaaggaaaagaagaaatacaattcatgaattcanaaaatcagcaaagactaccctaatcaaaatagatccagcactgaagataaaaaccaaaaaagtgaatactgcagaccaatgtgctaatagatgtactaggaataaaggacttccantcacttgcaaggcttttgtttttgataaagcaagaaaacaatgcctctggttccccttcaatagcatgtcaagtggagtgaaaaaagantttggccatgaatttgacctctatgaaaacaaagactacattagaaactgcatcattggtaaaggacgcagctacaagggaacagtatctatcactaagagtggcatcaaatgtcagccctgganttccatgataccacacgaacacagctttttgccttcgagctatcggggtaaagacctacaggaaaactactgtcgaaatcctcgaggggaagaagggggaccctggtgtttcacaagcaatccagaggtacgctacgaagtctgtgacattcctcagtgttcagaagttgaatgcatgacctgcaatggggagagttatcgaggtctcatggatcatacagaatcaggcaagatttgtcagcgctgggatcancagacaccacaccggcacaaattcttgcctgaaagatatcccgacaagggctttgatgataattattgccgcaatcccgatggccagccgaggccatggtgctatactcttgaccctcacacccgctgggagtactgtgcaattaaaacatgcgctgacaatactatgaatgacactgatgttcctttggaaacaactnaatgcatccaaggtcaaggagaaggctacaggggcactgtcaataccatttggaatggaattncatgtcagcgttggnattctcagtatcctcacgagcatgacatgactcctgaaaatttcaagtgcaaggacctacgagaaaattactgccgaaatccagatgggtctgaatcaccctngtgttttaccactgatccaaacatccgagttggctactgctcccaaattccaaactgtgatatgtcacatggacaagattgttatcgtgggaatggcaaaaattatatgggcaacttatcccaaacaagatctggactaacatgttcaatgtgggacaagaacatggaagacttacatcgtcatatcttctgggaaccagatgcaagtaagctgaatgagaattactgccgaaatccagatgatgatgctcatggaccctggtgctacacgggaaatccactcattccttgggattattgccctatttctcgttgtgaaggtgataccacacctacaatagtcaatttagaccatcccgtaatatcttgtgccaaaacgaaacaattgcgagttgtaaatgggattccaacacgaacaaacataggatggatggttagtttgagatacagaaataaacatatctgcggaggatcattgataaaggagagttgggttcttactgcacgacagtgtttcccttctcgagacttgaaagattatgaagcttggcttggaattcatgatgtccacggaagaggagatgagaaatgcaaacaggttctcaatgtttcccagctggtatatggccctgaaggatcagatctggttttaatgaagcttgccaggcctgctgtcctggatgattttgttagtacgattgatttacctaattatggatgcacaattcctgaaaagaccagttgcagtgtttatggctggggctacactggattgatcaactatgatggcctattacgagtggcacatctctatataatgggaaatgagaaatgcagccagcatcatcgagggaaggtgactctgaatgagtctgaaatatgtgctggggctgaaaagattggatcaggaccatgtgagggggattatggtggcccacttgtttgtgagcaacataaaatgagaatggttcttggtgtcattgttcctggtcgtggatgtgccattccaaatcgtcctggtatttttgtccgagtagcatattatgcaaaatggatacacaaaattattttaacatataaggtaccacagtcatagctgaagtaagtgtgtctgaagcacccaccaatacaactgtcttttacatgaagatttcagagaatgtggaatttaaaatgtcacttacaacaatcctaagacaactactggagagtcatgtttgttgaaattctcattaatgtttatgggtgttttctgttgttttgtttgtcagtgttattttgtcaatgttgaagtgaattaaggtacatgcaagtgtaataacatatctcctgaagatacttgaatggattaaaaaaacacacaggtatatttgctggatgataaagatttcatgggaaaaaaaatcaattaatctgtctaagctgctttctgatgttggtttcttaataatgagtaaaccacaaattaaatgttattttaacctcaccaaaacaatttataccttgtgtccctaaattgtagccctatattaaattatattacatttcaaaaaaaaaaaaaaaa

SEQ ID NO: 16 - protein, 728 aa, Homo sapiens
  VARIANT 78: Xaa = Lys or Asn
  VARIANT 82: Xaa = Phe or Leu
  VARIANT 153: Xaa = Ser or Ile
  VARIANT 180: Xaa = Pro or Thr
  VARIANT 293: Xaa = Met or Val
  VARIANT 300: Xaa = Leu or Met
  VARIANT 304: Xaa = Glu or Lys
  VARIANT 317: Xaa = Val or Ala
  VARIANT 325: Xaa = Pro or Ser
  VARIANT 330: Xaa = Asp or Tyr
  VARIANT 336: Xaa = Glu or Lys
  VARIANT 387: Xaa = His or Asn
  VARIANT 416: Xaa = Asp or Asn
  VARIANT 494: Xaa = Arg or Gln
  VARIANT 505: Xaa = Ile or Val
  VARIANT 509: Xaa = Val or Ile
  VARIANT 558: Xaa = Asp or Glu
  VARIANT 561: Xaa = Cys or Arg
  VARIANT 592: Xaa = Asp or Asn
  VARIANT 595: Xaa = Ser or Asn
  HGF sequence variants
MWVTKLLPALLLQHVLLHLLLLPIAIPYAEGQRKRRNTIHEFKKSAKTTLIKIDPALKIKTKKVNTADQCANRCTRNXGLPXTCKAFVFDKARKQCLWFPFNSMSSGVKKEFGHEFDLYENKDYIRNCIIGKGRSYKGTVSITKSGIKCQPWXSMIPHEHSFLPSSYRGKDLQENYCRNPRGEEGGPWCFTSNPEVRYEVCDIPQCSEVECMTCNGESYRGLMDHTESGKICQRWDHQTXHRHKFLPERYPDKGFDDNYCRNPDGQPRPWCYTLDPHTRWEYCAIKTCADNTXNDTDVPXETTXCIQGQGEGYRGTXNTIWNGIXCQRWXSQYPHXHDMTPENFKCKDLRENYCRNPDGSESPWCFTTDPNIRVGYCSQIPNCDMSXGQDCYRGNGKNYMGNLSQTRSGLTCSMWXKNMEDLHRHIFWEPDASKLNENYCRNPDDDAHGPWCYTGNPLIPWDYCPISRCEGDTTPTIVNLDHPVISCAKTKQLXVVNGIPTRTNXGWMXSLRYRNKHICGGSLIKESWVLTARQCFPSRDLKDYEAWLGIHDVHGRGXEKXKQVLNVSQLVYGPEGSDLVLMKLARPAVLDXFVXTIDLPNYGCTIPEKTSCSVYGWGYTGLINYDGLLRVAHLYIMGNEKCSQHHRGKVTLNESEICAGAEKIGSGPCEGDYGGPLVCEQHKMRMVLGVIVPGRGCAIPNRPGIFVRVAYYAKWIHKIILTYKVPQS

SEQ ID NO: 17 - DNA, 1471 bp, Homo sapiens
  SR023A02
cccaggcatctcctccagagggatccgccagcccgtccagcagcaccatgtgggtgaccaaactcctgccagccctgctgctgcagcatgtcctcctgcatctcctcctgctccccatcgccatcccctatgcagagggacaaaggaaaagaagaaatacaattcatgaattcaaaaaatcagcaaagactaccctaatcaaaatagatccagcactgaagataaaaaccaaaaaagtgaatactgcagaccaatgtgctaatagatgtactaggaataaaggacttccattcacttgcaaggcttttgtttttgataaagcaagaaaacaatgcctctggttccccttcaatagcatgtcaagtggagtgaaaaaagaatttggccatgaatttgacctctatgaaaacaaagactacattagaaactgcatcattggtaaaggacgcagctacaagggaacagtatctatcactaagagtggcatcaaatgtcagccctggagttccatgataccacacgaacacagctatcggggtaaagacctacaggaaaactactgtcgaaatcctcgaggggaagaagggggaccctggtgtttcacaagcaatccagaggtacgctacgaagtctgtgacattcctcagtgttcagaagttgaatgcatgacctgcaatggggagagttatcgaggtctcatggatcatacagaatcaggcaagatttgtcagcgctgggatcatcagacaccacaccggcacaaattcttgcctgaaagatatcccgacaagggctttgatgataattattgccgcaatcccgatggccagccgaggccatggtgctatactcttgaccctcacacccgctgggagtactgtgcaattaaaacatgcgctgacaatactatgaatgacactgatgttcctttggaaacaactgaatgcatccaaggtcaaggagaaggctacaggggcactgtcaataccatttggaatggaattccatgtcagcgttgggattctcagtatcctcacgagcatgacatgactcctgaaaatttcaagtgcaaggacctacgagaaaattactgccgaaatccagatgggtctgaatcaccctggtgttttaccactgatccaaacatccgagttggctactgctcccaaattccaaactgtgatatgtcacatggacaagattgttatcgtgggaatggcaaaaattatatgggcaacttatcccaaacaagatctggactaacatgttcaatgtgggacaagaacatggaagacttacatcgtcatatcttctgggaaccagatgcaagtaagctgaatgagaattactgccgaaatccagatgatgatgctcatggaccctggtgctacacgggaaatccactcattccttgggattattgccctatttctcgttgtaagtacagttagggattggtgtcttgtgaaat

SEQ ID NO: 18 - protein, 467 aa, Homo sapiens
  SR023A02
MWVTKLLPALLLQHVLLHLLLLPIAIPYAEGQRKRRNTIHEFKKSAKTTLIKIDPALKIKTKKVNTADQCANRCTRNKGLPFTCKAFVFDKARKQCLWFPFNSMSSGVKKEFGHEFDLYENKDYIRNCIIGKGRSYKGTVSITKSGIKCQPWSSMIPHEHSYRGKDLQENYCRNPRGEEGGPWCFTSNPEVRYEVCDIPQCSEVECMTCNGESYRGLMDHTESGKICQRWDHQTPHRHKFLPERYPDKGFDDNYCRNPDGQPRPWCYTLDPHTRWEYCAIKTCADNTMNDTDVPLETTECIQGQGEGYRGTVNTIWNGIPCQRWDSQYPHEHDMTPENFKCKDLRENYCRNPDGSESPWCFTTDPNIRVGYCSQIPNCDMSHGQDCYRGNGKNYMGNLSQTRSGLTCSMWDKNMEDLHRHIFWEPDASKLNENYCRNPDDDAHGPWCYTGNPLIPWDYCPISRCKYS

SEQ ID NO: 19 - DNA, 1495 bp, Homo sapiens
  SR023A08
attctttcacccaggcatctcctccagagggatccgccagcccgtccagcagcaccatgtgggtgaccaaactcctgccagccctgctgctgcagcatgtcctcctgcatctcctcctgctccccatcgccatcccctatgcagagggacaaaggaaaagaagaaatacaattcatgaattcaaaaaatcagcaaagactaccctaatcaaaatagatccagcactgaagataaaaaccaaaaaagtgaatactgcagaccaatgtgctaatagatgtactaggaataaaggacttccattcacttgcaaggcttttgtttttgataaagcaagaaaacaatgcctctggttccccttcaatagcatgtcaagtggagtgaaaaaagaatttggccatgaatttgacctctatgaaaacaaagactacattagaaactgcatcattggtaaaggacgcagctacaagggaacagtatctatcactaagagtggcatcaaatgtcagccctggagttccatgataccacacgaacacagctttttgccttcgagctatcggggtaaagacctacaggaaaactactgtcgaaatcctcgaggggaagaagggggaccctggtgtttcacaagcaatccagaggtacgctacgaagtctgtgacattcctcagtgttcagaagttgaatgcatgacctgcaatggggagagttatcgaggtctcatggatcatacagaatcaggcaagatttgtcagcgctgggatcatcagacaccacaccggcacaaattcttgcctgaaagatatcccgacaagggctttgatgataattattgccgcaatcccgatggccagccgaggccatggtgctatactcttgaccctcacacccgctgggagtactgtgcaattaaaacatgcgctgacaatactatgaatgacactgatgttcctttggaaacaactgaatgcatccaaggtcaaggagaaggctacaggggcactgtcaataccatttggaatggaattccatgtcagcgttgggattctcagtatcctcacgagcatgacatgactcctgaaaatttcaagtgcaaggacctacgagaaaattactgccgaaatccagatgggtctgaatcaccctggtgttttaccactgatccaaacatccgagttggctactgctcccaaattccaaactgtgatatgtcacatggacaagattgttatcgtgggaatggcaaaaattatatgggcaacttatcccaaacaagatctggactaacatgttcaatgtgggacaagaacatggaagacttacatcgtcatatcttctgggaaccagatgcaagtaagctgaatgagaattactgccgaaatccagatgatgatgctcatggaccctggtgctacacgggaaatccactcattccttgggattattgccctatttctcgttgtaagtacagttagggattggtgtcttgtgaaat

SEQ ID NO: 20 - protein, 472 aa, Homo sapiens
  SR023A08
MWVTKLLPALLLQHVLLHLLLLPIAIPYAEGQRKRRNTIHEFKKSAKTTLIKIDPALKIKTKKVNTADQCANRCTRNKGLPFTCKAFVFDKARKQCLWFPFNSMSSGVKKEFGHEFDLYENKDYIRNCIIGKGRSYKGTVSITKSGIKCQPWSSMIPHEHSFLPSSYRGKDLQENYCRNPRGEEGGPWCFTSNPEVRYEVCDIPQCSEVECMTCNGESYRGLMDHTESGKICQRWDHQTPHRHKFLPERYPDKGFDDNYCRNPDGQPRPWCYTLDPHTRWEYCAIKTCADNTMNDTDVPLETTECIQGQGEGYRGTVNTIWNGIPCQRWDSQYPHEHDMTPENFKCKDLRENYCRNPDGSESPWCFTTDPNIRVGYCSQIPNCDMSHGQDCYRGNGKNYMGNLSQTRSGLTCSMWDKNMEDLHRHIFWEPDASKLNENYCRNPDDDAHGPWCYTGNPLIPWDYCPISRCKYS

SEQ ID NO: 21 - DNA, 1307 bp, Homo sapiens
  HGF transcript variant 2
gggagttcagacctagatctttccagttaatcacacaacaaacttagctcatcgcaataaaaagcagctcagagccgactggctcttttaggcactgactccgaacaggattctttcacccaggcatctcctccagagggatccgccagcccgtccagcagcaccatgtgggtgaccaaactcctgccagccctgctgctgcagcatgtcctcctgcatctcctcctgctccccatcgccatcccctatgcagagggacaaaggaaaagaagaaatacaattcatgaattcaaaaaatcagcaaagactaccctaatcaaaatagatccagcactgaagataaaaaccaaaaaagtgaatactgcagaccaatgtgctaatagatgtactaggaataaaggacttccattcacttgcaaggcttttgtttttgataaagcaagaaaacaatgcctctggttccccttcaatagcatgtcaagtggagtgaaaaaagaatttggccatgaatttgacctctatgaaaacaaagactacattagaaactgcatcattggtaaaggacgcagctacaagggaacagtatctatcactaagagtggcatcaaatgtcagccctggagttccatgataccacacgaacacagctttttgccttcgagctatcggggtaaagacctacaggaaaactactgtcgaaatcctcgaggggaagaagggggaccctggtgtttcacaagcaatccagaggtacgctacgaagtctgtgacattcctcagtgttcagaagttgaatgcatgacctgcaatggggagagttatcgaggtctcatggatcatacagaatcaggcaagatttgtcagcgctgggatcatcagacaccacaccggcacaaattcttgcctgaaagatatcccgacaagggctttgatgataattattgccgcaatcccgatggccagccgaggccatggtgctatactcttgaccctcacacccgctgggagtactgtgcaattaaaacatgcgagacataacatgggctctcaactgatggtgaacttcttctggtgagtgacagaggctgcagtgaagaataatgagtctaatagaagtttatcacagatgtctctaatctttatagctgatccctacctctctcgctgtctttgtacccagcctgcattctgtttcgatctgtcttttagcagtccatacaatcatttttctacatgctggcccttacctagcttttctgaatttacaataaaaactattttttaacgtgaaaaaaaaaaaaaaaaaa

SEQ ID NO: 22 - protein, 290 aa, Homo sapiens
  HGF Isoform 2
MWVTKLLPALLLQHVLLHLLLLPIAIPYAEGQRKRRNTIHEFKKSAKTTLIKIDPALKIKTKKVNTADQCANRCTRNKGLPFTCKAFVFDKARKQCLWFPFNSMSSGVKKEFGHEFDLYENKDYIRNCIIGKGRSYKGTVSITKSGIKCQPWSSMIPHEHSFLPSSYRGKDLQENYCRNPRGEEGGPWCFTSNPEVRYEVCDIPQCSEVECMTCNGESYRGLMDHTESGKICQRWDHQTPHRHKFLPERYPDKGFDDNYCRNPDGQPRPWCYTLDPHTRWEYCAIKTCET

SEQ ID NO: 23 - DNA, 2805 bp, Homo sapiens
  HGF transcript variant 3
gggagttcagacctagatctttccagttaatcacacaacaaacttagctcatcgcaataaaaagcagctcagagccgactggctcttttaggcactgactccgaacaggattctttcacccaggcatctcctccagagggatccgccagcccgtccagcagcaccatgtgggtgaccaaactcctgccagccctgctgctgcagcatgtcctcctgcatctcctcctgctccccatcgccatcccctatgcagagggacaaaggaaaagaagaaatacaattcatgaattcaaaaaatcagcaaagactaccctaatcaaaatagatccagcactgaagataaaaaccaaaaaagtgaatactgcagaccaatgtgctaatagatgtactaggaataaaggacttccattcacttgcaaggcttttgtttttgataaagcaagaaaacaatgcctctggttccccttcaatagcatgtcaagtggagtgaaaaaagaatttggccatgaatttgacctctatgaaaacaaagactacattagaaactgcatcattggtaaaggacgcagctacaagggaacagtatctatcactaagagtggcatcaaatgtcagccctggagttccatgataccacacgaacacagctatcggggtaaagacctacaggaaaactactgtcgaaatcctcgaggggaagaagggggaccctggtgtttcacaagcaatccagaggtacgctacgaagtctgtgacattcctcagtgttcagaagttgaatgcatgacctgcaatggggagagttatcgaggtctcatggatcatacagaatcaggcaagatttgtcagcgctgggatcatcagacaccacaccggcacaaattcttgcctgaaagatatcccgacaagggctttgatgataattattgccgcaatcccgatggccagccgaggccatggtgctatactcttgaccctcacacccgctgggagtactgtgcaattaaaacatgcgctgacaatactatgaatgacactgatgttcctttggaaacaactgaatgcatccaaggtcaaggagaaggctacaggggcactgtcaataccatttggaatggaattccatgtcagcgttgggattctcagtatcctcacgagcatgacatgactcctgaaaatttcaagtgcaaggacctacgagaaaattactgccgaaatccagatgggtctgaatcaccctggtgttttaccactgatccaaacatccgagttggctactgctcccaaattccaaactgtgatatgtcacatggacaagattgttatcgtgggaatggcaaaaattatatgggcaacttatcccaaacaagatctggactaacatgttcaatgtgggacaagaacatggaagacttacatcgtcatatcttctgggaaccagatgcaagtaagctgaatgagaattactgccgaaatccagatgatgatgctcatggaccctggtgctacacgggaaatccactcattccttgggattattgccctatttctcgttgtgaaggtgataccacacctacaatagtcaatttagaccatcccgtaatatcttgtgccaaaacgaaacaattgcgagttgtaaatgggattccaacacgaacaaacataggatggatggttagtttgagatacagaaataaacatatctgcggaggatcattgataaaggagagttgggttcttactgcacgacagtgtttcccttctcgagacttgaaagattatgaagcttggcttggaattcatgatgtccacggaagaggagatgagaaatgcaaacaggttctcaatgtttcccagctggtatatggccctgaaggatcagatctggttttaatgaagcttgccaggcctgctgtcctggatgattttgttagtacgattgatttacctaattatggatgcacaattcctgaaaagaccagttgcagtgtttatggctggggctacactggattgatcaactatgatggcctattacgagtggcacatctctatataatgggaaatgagaaatgcagccagcatcatcgagggaaggtgactctgaatgagtctgaaatatgtgctggggctgaaaagattggatcaggaccatgtgagggggattatggtggcccacttgtttgtgagcaacataaaatgagaatggttcttggtgtcattgttcctggtcgtggatgtgccattccaaatcgtcctggtatttttgtccgagtagcatattatgcaaaatggatacacaaaattattttaacatataaggtaccacagtcatagctgaagtaagtgtgtctgaagcacccaccaatacaactgtcttttacatgaagatttcagagaatgtggaatttaaaatgtcacttacaacaatcctaagacaactactggagagtcatgtttgttgaaattctcattaatgtttatgggtgttttctgttgttttgtttgtcagtgttattttgtcaatgttgaagtgaattaaggtacatgcaagtgtaataacatatctcctgaagatacttgaatggattaaaaaaacacacaggtatatttgctggatgataaagatttcatgggaaaaaaaatcaattaatctgtctaagctgctttctgatgttggtttcttaataatgagtaaaccacaaattaaatgttattttaacctcaccaaaacaatttataccttgtgtccctaaattgtagccctatattaaattatattacatttcaaaaaaaaaaaaaaaa

SEQ ID NO: 24 - protein, 723 aa, Homo sapiens
  HGF Isoform 3
MWVTKLLPALLLQHVLLHLLLLPIAIPYAEGQRKRRNTIHEFKKSAKTTLIKIDPALKIKTKKVNTADQCANRCTRNKGLPFTCKAFVFDKARKQCLWFPFNSMSSGVKKEFGHEFDLYENKDYIRNCIIGKGRSYKGTVSITKSGIKCQPWSSMIPHEHSYRGKDLQENYCRNPRGEEGGPWCFTSNPEVRYEVCDIPQCSEVECMTCNGESYRGLMDHTESGKICQRWDHQTPHRHKFLPERYPDKGFDDNYCRNPDGQPRPWCYTLDPHTRWEYCAIKTCADNTMNDTDVPLETTECIQGQGEGYRGTVNTIWNGIPCQRWDSQYPHEHDMTPENFKCKDLRENYCRNPDGSESPWCFTTDPNIRVGYCSQIPNCDMSHGQDCYRGNGKNYMGNLSQTRSGLTCSMWDKNMEDLHRHIFWEPDASKLNENYCRNPDDDAHGPWCYTGNPLIPWDYCPISRCEGDTTPTIVNLDHPVISCAKTKQLRVVNGIPTRTNIGWMVSLRYRNKHICGGSLIKESWVLTARQCFPSRDLKDYEAWLGIHDVHGRGDEKCKQVLNVSQLVYGPEGSDLVLMKLARPAVLDDFVSTIDLPNYGCTIPEKTSCSVYGWGYTGLINYDGLLRVAHLYIMGNEKCSQHHRGKVTLNESEICAGAEKIGSGPCEGDYGGPLVCEQHKMRMVLGVIVPGRGCAIPNRPGIFVRVAYYAKWIHKIILTYKVPQS

SEQ ID NO: 25 - DNA, 1292 bp, Homo sapiens
  HGF transcript variant 4
gggagttcagacctagatctttccagttaatcacacaacaaacttagctcatcgcaataaaaagcagctcagagccgactggctcttttaggcactgactccgaacaggattctttcacccaggcatctcctccagagggatccgccagcccgtccagcagcaccatgtgggtgaccaaactcctgccagccctgctgctgcagcatgtcctcctgcatctcctcctgctccccatcgccatcccctatgcagagggacaaaggaaaagaagaaatacaattcatgaattcaaaaaatcagcaaagactaccctaatcaaaatagatccagcactgaagataaaaaccaaaaaagtgaatactgcagaccaatgtgctaatagatgtactaggaataaaggacttccattcacttgcaaggcttttgtttttgataaagcaagaaaacaatgcctctggttccccttcaatagcatgtcaagtggagtgaaaaaagaatttggccatgaatttgacctctatgaaaacaaagactacattagaaactgcatcattggtaaaggacgcagctacaagggaacagtatctatcactaagagtggcatcaaatgtcagccctggagttccatgataccacacgaacacagctatcggggtaaagacctacaggaaaactactgtcgaaatcctcgaggggaagaagggggaccctggtgtttcacaagcaatccagaggtacgctacgaagtctgtgacattcctcagtgttcagaagttgaatgcatgacctgcaatggggagagttatcgaggtctcatggatcatacagaatcaggcaagatttgtcagcgctgggatcatcagacaccacaccggcacaaattcttgcctgaaagatatcccgacaagggctttgatgataattattgccgcaatcccgatggccagccgaggccatggtgctatactcttgaccctcacacccgctgggagtactgtgcaattaaaacatgcgagacataacatgggctctcaactgatggtgaacttcttctggtgagtgacagaggctgcagtgaagaataatgagtctaatagaagtttatcacagatgtctctaatctttatagctgatccctacctctctcgctgtctttgtacccagcctgcattctgtttcgatctgtcttttagcagtccatacaatcatttttctacatgctggcccttacctagcttttctgaatttacaataaaaactattttttaacgtgaaaaaaaaaaaaaaaaaa

SEQ ID NO: 26 - protein, 296 aa, Homo sapiens
  HGF Isoform 4
MWVTKLLPALLLQHVLLHLLLLPIAIPYAEGQRKRRNTIHEFKKSAKTTLIKIDPALKIKTKKVNTADQCANRCTRNKGLPFTCKAFVFDKARKQCLWFPFNSMSSGVKKEFGHEFDLYENKDYIRNCIIGKGRSYKGTVSITKSGIKCQPWSSMIPHEHSFLPSSYRGKDLQENYCRNPRGEEGGPWCFTSNPEVRYEVCDIPQCSEVECMTCNGESYRGLMDHTESGKICQRWDHQTPHRHKFLPERYPDKGFDDNYCRNPDGQPRPWCYTLDPHTRWEYCAIKNMRDITWALN

SEQ ID NO: 27 - DNA, 2079 bp, Homo sapiens
  HGF transcript variant 5
gggagttcagacctagatctttccagttaatcacacaacaaacttagctcatcgcaataaaaagcagctcagagccgactggctcttttaggcactgactccgaacaggattctttcacccaggcatctcctccagagggatccgccagcccgtccagcagcaccatgtgggtgaccaaactcctgccagccctgctgctgcagcatgtcctcctgcatctcctcctgctccccatcgccatcccctatgcagagggacaaaggaaaagaagaaatacaattcatgaattcaaaaaatcagcaaagactaccctaatcaaaatagatccagcactgaagataaaaaccaaaaaagtgaatactgcagaccaatgtgctaatagatgtactaggaataaaggacttccattcacttgcaaggcttttgtttttgataaagcaagaaaacaatgcctctggttccccttcaatagcatgtcaagtggagtgaaaaaagaatttggccatgaatttgacctctatgaaaacaaagactacattagaaactgcatcattggtaaaggacgcagctacaagggaacagtatctatcactaagagtggcatcaaatgtcagccctggagttccatgataccacacgaacacagctttttgccttcgagctatcggggtaaagacctacaggaaaactactgtcgaaatcctcgaggggaagaagggggaccctggtgtttcacaagcaatccagaggtacgctacgaagtctgtgacattcctcagtgttcagaaggtaaataaacctgaatgccatgtgggccattctattccccctatgtgtagaactgtaactcacattaaaggttaacagcaacgaatcaatcataacaaatatgttgttcgtgcaaatgcaactacaaataattatttaaacatttttatacaatgtttttaaaactgttggattatcaccagattaatgcaaaataacagagcgagttatcagtttgaatttcaacactgcctgagacatccctctggggaaagtgaaagagagggtttacttacctactgtcttgagctcacatacctcaaaatctactactgtgtggcacctgaaaggagttgaatgaagcttagcctttcattagcaatgttaattctattcaaccagcacctgcttccacagaaattctgtccaaactatcatgaagtggtgtgacaagggtatatggacccagaagataatacaatataagaagggatcactggaagcttgaccccatgcacattttggtgaaaatgtgcctagaatcaaatgtgacacgtaggctggaactgagtaccattcagaataggatctgaagagatcaaagcaatggagaccaccaaactgtcttgaaggcatgtctatggaccttaagtccatgtctatgttttcagctcttctcacagcataaaagggcattgtccttacttttgcagtggaaaactgaatggctgacaagatggaagagtaaccatttcagcattgtatgtggtttcatttttcttagttatctggctactgaatagccggatttttcagttctgtcagaaactctaaatttccaaaaatctaagtgaaacatggatgaaactctgttagaaaattgttaggattttggagtatttggggagggggactactggaatgctgtccaagttttatactaagatatcttacctgtttgttattaaccaaatatttttaaaaatatttcctccataaatattcatttaatattaggttgatatttatcacataaaaagtaaaggctactgttagctaattgtcacagagaaggatttgttttctgttgttagtgaatttgaaatccttgactttatgtgctacagccagttccatctctgtttgtaaattcttactttccattccatatcatattctgttccctataacctcttcattgttttcttttcttttaaaaataataaacttttctatgatcaaaaaaaaaaaaaaaaaaaaaaaaaaaaaaaaaaaaaaaaaaaaaaaaaaaaaaaaaaaaaaaaaaaaaa

SEQ ID NO: 28 - protein, 285 aa, Homo sapiens
  HGF Isoform 5
MWVTKLLPALLLQHVLLHLLLLPIAIPYAEGQRKRRNTIHEFKKSAKTTLIKIDPALKIKTKKVNTADQCANRCTRNKGLPFTCKAFVFDKARKQCLWFPFNSMSSGVKKEFGHEFDLYENKDYIRNCIIGKGRSYKGTVSITKSGIKCQPWSSMIPHEHSYRGKDLQENYCRNPRGEEGGPWCFTSNPEVRYEVCDIPQCSEVECMTCNGESYRGLMDHTESGKICQRWDHQTPHRHKFLPERYPDKGFDDNYCRNPDGQPRPWCYTLDPHTRWEYCAIKTCET

SEQ ID NO: 29 - DNA, 1909 bp, Homo sapiens
  HGF transcript variant 6
tctttcacccaggcatctcctccagagggatccgccagcccgtccagcagcaccatgtgggtgaccaaactcctgccagccctgctgctgcagcatgtcctcctgcatctcctcctgctccccatcgccatcccctatgcagagggacaaaggaaaagaagaaatacaattcatgaattcaaaaaatcagcaaagactaccctaatcaaaatagatccagcactgaagataaaaaccaaaaaagtgaatactgcagaccaatgtgctaatagatgtactaggaataaaggacttccattcacttgcaaggcttttgtttttgataaagcaagaaaacaatgcctctggttccccttcaatagcatgtcaagtggagtgaaaaaagaatttggccatgaatttgacctctatgaaaacaaagactacattagaaactgcatcattggtaaaggacgcagctacaagggaacagtatctatcactaagagtggcatcaaatgtcagccctggagttccatgataccacacgaacacagctttttgccttcgagctatcggggtaaagacctacaggaaaactactgtcgaaatcctcgaggggaagaagggggaccctggtgtttcacaagcaatccagaggtacgctacgaagtctgtgacattcctcagtgttcagaaggtaaataaacctgaatgccatgtgggccattctattccccctatgtgtagaactgtaactcacattaaaggttaacagcaacgaatcaatcataacaaatatgttgttcgtgcaaatgcaactacaaataattatttaaacatttttatacaatttttttaaaactgttggattatcaccagattaatgcaaaataacagagcgagttatcagtttgaatttcaacactgcctgagacatccctctggggaaagtgaaagagagggtttacttacctactgtcttgagctcacatacctcaaaatctactactgtgtggcacctgaaaggagttgaatgaagcttagcctttcattagcaatgttaattctatcaaccagcacctgcttccacagaaattctgtccaaactatcatgaagtggtgtgacaagggtatatggacccagaagataatacaatataagaagggatcactggaagcttgaccccatgcacattttggtgaaaatgtgcctagaatcaaatgtgacacgtaggctggaactgagtaccattcagaataggatctgaagagatcaaagcaatggagaccaccaaactgtcttgaaggcatgtctatggaccttaagtccatgtctatgttttcagctcttctcacagcataaaagggcattgtccttacttttgcagtggaaaactgaatggctgacaagatggaagagtaaccatttcagcattgtatgtggtttcatttttcttagttatctggctactgaatagccggatttttcagttctgtcagaaactctaaatttccaaaaatctaagtgaaacatggatgaaactctgttagaaaattgttaggattttggagtatttggggagggggactactggaatgctgtccaagttttatactaagatatcttacctgtttgttattaaccaaatatttttaaaaatatttcctccataaatattcatttaatattaggttgatatttatcacataaaaagtaaaggctactgttagctaattgtcacagagaaggatttgttttctgttgttagtgaatttgaaatccttgactttatgtgctacagccagttccatctctgtttgtaaattcttactttccattccatatcatattctgttccctataacctcttcattgttttctttctttttaaaaataataaacttttctatgatcacgttttgaaca

SEQ ID NO: 30 - protein, 210 aa, Homo sapiens
  HGF Isoform 6
MWVTKLLPALLLQHVLLHLLLLPIAIPYAEGQRKRRNTIHEFKKSAKTTLIKIDPALKIKTKKVNTADQCANRCTRNKGLPFTCKAFVFDKARKQCLWFPFNSMSSGVKKEFGHEFDLYENKDYIRNCIIGKGRSYKGTVSITKSGIKCQPWSSMIPHEHSFLPSSYRGKDLQENYCRNPRGEEGGPWCFTSNPEVRYEVCDIPQCSEGK

SEQ ID NO: 31 - DNA, 1340 bp, Homo sapiens
  HGF NK4
caaaggaaaagaagaaatacaattcatgaattcaaaaaatcagcaaagactaccctaatcaaaatagatccagcactgaagataaaaaccaaaaaagtgaatactgcagaccaatgtgctaatagatgtactaggaataaaggacttccattcacttgcaaggcttttgtttttgataaagcaagaaaacaatgcctctggttccccttcaatagcatgtcaagtggagtgaaaaaagaatttggccatgaatttgacctctatgaaaacaaagactacattagaaactgcatattggtaaaggacgcagctacaagggaacagtatctatcactaagagtggcatcaaatgtcagccctggagttccatgataccacacgaacacagctttttgccttcgagctatcggggtaaagacctacaggaaaactactgtcgaaatcctcgaggggaagaagggggaccctggtgtttcacaagcaatccagaggtacgctacgaagtctgtgacattcctcagtgttcagaagttgaatgcatgacctgcaatggggagagttatcgaggtctcatggatcatacagaatcaggcaagatttgtcagcgctgggatcatcagacaccacaccggcacaaattcttgcctgaaagatatcccgacaagggctttgatgataattattgccgcaatcccgatggccagccgaggccatggtgctatactcttgaccctcacacccgctgggagtactgtgcaattaaaacatgcgctgacaatactatgaatgacactgatgttcctttggaaacaactgaatgcatccaaggtcaaggagaaggctacaggggcactgtcaataccatttggaatggaattccatgtcagcgttgggattctcagtatcctcacgagcatgacatgactcctgaaaatttcaagtgcaaggacctacgagaaaattactgccgaaatccagatgggtctgaatcaccctggtgttttaccactgatccaaacatccgagttggctactgctcccaaattccaaactgtgatatgtcacatggacaagattgttatcgtgggaatggcaaaaattatatgggcaacttatcccaaacaagatctggactaacatgttcaatgtgggacaagaacatggaagacttacatcgtcatatcttctgggaaccagatgcaagtaagctgaatgagaattactgccgaaatccagatgatgatgctcatggaccctggtgctacacgggaaatccactcattccttgggattattgccctatttctcgttgtgaaggtgataccacacctacaatagtc

SEQ ID NO: 32 - protein, 447 aa, Homo sapiens
  HGF NK4
QRKRRNTIHEFKKSAKTTLIKIDPALKIKTKKVNTADQCANRCTRNKGLPFTCKAFVFDKARKQCLWFPFNSMSSGVKKEFGHEFDLYENKDYIRNCIIGKGRSYKGTVSITKSGIKCQPWSSMIPHEHSFLPSSYRGKDLQENYCRNPRGEEGGPWCFTSNPEVRYEVCDIPQCSEVECMTCNGESYRGLMDHTESGKICQRWDHQTPHRHKFLPERYPDKGFDDNYCRNPDGQPRPWCYTLDPHTRWEYCAIKTCADNTMNDTDVPLETTECIQGQGEGYRGTVNTIWNGIPCQRWDSQYPHEHDMTPENFKCKDLRENYCRNPDGSESPWCFTTDPNIRVGYCSQIPNCDMSHGQDCYRGNGKNYMGNLSQTRSGLTCSMWDKNMEDLHRHIFWEPDASKLNENYCRNPDDDAHGPWCYTGNPLIPWDYCPISRCEGDTTPTIV

SEQ ID NO: 33 - DNA, 6641 bp, Homo sapiens
  ref <308>: DATABASE ACCESSION NUMBER: GenBank No. NM000245
  ref <309>: DATABASE ENTRY DATE: 2004-10-28
gccctcgccgcccgcggcgccccgagcgctttgtgagcagatgcggagccgagtggagggcgcgagccagatgcggggcgacagctgacttgctgagaggaggcggggaggcgcggagcgcgcgtgtggtccttgcgccgctgacttctccactggttcctgggcaccgaaagataaacctctcataatgaaggcccccgctgtgcttgcacctggcatcctcgtgctcctgtttaccttggtgcagaggagcaatggggagtgtaaagaggcactagcaaagtccgagatgaatgtgaatatgaagtatcagcttcccaacttcaccgcggaaacacccatccagaatgtcattctacatgagcatcacattttccttggtgccactaactacatttatgttttaaatgaggaagaccttcagaaggttgctgagtacaagactgggcctgtgctggaacacccagattgtttcccatgtcaggactgcagcagcaaagccaatttatcaggaggtgtttggaaagataacatcaacatggctctagttgtcgacacctactatgatgatcaactcattagctgtggcagcgtcaacagagggacctgccagcgacatgtctttccccacaatcatactgctgacatacagtcggaggttcactgcatattctccccacagatagaagagcccagccagtgtcctgactgtgtggtgagcgccctgggagccaaagtcctttcatctgtaaaggaccggttcatcaacttctttgtaggcaataccataaattcttcttatttcccagatcatccattgcattcgatatcagtgagaaggctaaaggaaacgaaagatggttttatgtttttgacggaccagtcctacattgatgttttacctgagttcagagattcttaccccattaagtatgtccatgcctttgaaagcaacaattttatttacttcttgacggtccaaagggaaactctagatgctcagacttttcacacaagaataatcaggttctgttccataaactctggattgcattcctacatggaaatgcctctggagtgtattctcacagaaaagagaaaaaagagatccacaaagaaggaagtgtttaatatacttcaggctgcgtatgtcagcaagcctggggcccagcttgctagacaaataggagccagcctgaatgatgacattcttttcggggtgttcgcacaaagcaagccagattctgccgaaccaatggatcgatctgccatgtgtgcattccctatcaaatatgtcaacgacttcttcaacaagatcgtcaacaaaaacaatgtgagatgtctccagcatttttacggacccaatcatgagcactgctttaataggacacttctgagaaattcatcaggctgtgaagcgcgccgtgatgaatatcgaacagagtttaccacagctttgcagcgcgttgacttattcatgggtcaattcagcgaagtcctcttaacatctatatccaccttcattaaaggagacctcaccatagctaatcttgggacatcagagggtcgcttcatgcaggttgtggtttctcgatcaggaccatcaacccctcatgtgaattttctcctggactcccatccagtgtctccagaagtgattgtggagcatacattaaaccaaaatggctacacactggttatcactgggaagaagatcacgaagatcccattgaatggcttgggctgcagacatttccagtcctgcagtcaatgcctctctgccccaccctttgttcagtgtggctggtgccacgacaaatgtgtgcgatcggaggaatgcctgagcgggacatggactcaacagatctgtctgcctgcaatctacaaggttttcccaaatagtgcaccccttgaaggagggacaaggctgaccatatgtggctgggactttggatttcggaggaataataaatttgatttaaagaaaactagagttctccttggaaatgagagctgcaccttgactttaagtgagagcacgatgaatacattgaaatgcacagttggtcctgccatgaataagcatttcaatatgtccataattatttcaaatggccacgggacaacacaatacagtacattctcctatgtggatcctgtaataacaagtatttcgccgaaatacggtcctatggctggtggcactttacttactttaactggaaattacctaaacagtgggaattctagacacatttcaattggtggaaaaacatgtactttaaaaagtgtgtcaaacagtattcttgaatgttataccccagcccaaaccatttcaactgagtttgctgttaaattgaaaattgacttagccaaccgagagacaagcatcttcagttaccgtgaagatcccattgtctatgaaattcatccaaccaaatcttttattagtggtgggagcacaataacaggtgttgggaaaaacctgaattcagttagtgtcccgagaatggtcataaatgtgcatgaagcaggaaggaactttacagtggcatgtcaacatcgctctaattcagagataatctgttgtaccactccttccctgcaacagctgaatctgcaactccccctgaaaaccaaagcctttttcatgttagatgggatcctttccaaatactttgatctcatttatgtacataatcctgtgtttaagccttttgaaaagccagtgatgatctcaatgggcaatgaaaatgtactggaaattaagggaaatgatattgaccctgaagcagttaaaggtgaagtgttaaaagttggaaataagagctgtgagaatatacacttacattctgaagccgttttatgcacggtccccaatgacctgctgaaattgaacagcgagctaaatatagagtggaagcaagcaatttcttcaaccgtccttggaaaagtaatagttcaaccagatcagaatttcacaggattgattgctggtgttgtctcaatatcaacagcactgttattactacttgggtttttcctgtggctgaaaaagagaaagcaaattaaagatctgggcagtgaattagttcgctacgatgcaagagtacacactcctcatttggataggcttgtaagtgcccgaagtgtaagcccaactacagaaatggtttcaaatgaatctgtagactaccgagctacttttccagaagatcagtttcctaattcatctcagaacggttcatgccgacaagtgcagtatcctctgacagacatgtcccccatcctaactagtggggactctgatatatccagtccattactgcaaaatactgtccacattgacctcagtgctctaaatccagagctggtccaggcagtgcagcatgtagtgattgggcccagtagcctgattgtgcatttcaatgaagtcataggaagagggcattttggttgtgtatatcatgggactttgttggacaatgatggcaagaaaattcactgtgctgtgaaatccttgaacagaatcactgacataggagaagtttcccaatttctgaccgagggaatcatcatgaaagattttagtcatcccaatgtcctctcgctcctgggaatctgcctgcgaagtgaagggtctccgctggtggtcctaccatacatgaaacatggagatcttcgaaatttcattcgaaatgagactcataatccaactgtaaaagatcttattggctttggtcttcaagtagccaaaggcatgaaatatcttgcaagcaaaaagtttgtccacagagacttggctgcaagaaactgtatgctggatgaaaaattcacagtcaaggttgctgattttggtcttgccagagacatgtatgataaagaatactatagtgtacacaacaaaacaggtgcaaagctgccagtgaagtggatggctttggaaagtctgcaaactcaaaagtttaccaccaagtcagatgtgtggtcctttggcgtgctcctctgggagctgatgacaagaggagccccaccttatcctgacgtaaacacctttgatataactgtttacttgttgcaagggagaagactcctacaacccgaatactgcccagaccccttatatgaagtaatgctaaaatgctggcaccctaaagccgaaatgcgcccatccttttctgaactggtgtcccggatatcagcgatcttctctactttcattggggagcactatgtccatgtgaacgctacttatgtgaacgtaaaatgtgtcgctccgtatccttctctgttgtcatcagaagataacgctgatgatgaggtggacacacgaccagcctccttctgggagacatcatagtgctagtactatgtcaaagcaacagtccacactttgtccaatggttttttcactgcctgacctttaaaaggccatcgatattctttgctcttgccaaaattgcactattataggacttgtattgttatttaaattactggattctaaggaatttcttatctgacagagcatcagaaccagaggcttggtcccacaggccacggaccaatggcctgcagccgtgacaacactcctgtcatattggagtccaaaacttgaattctgggttgaattttttaaaaatcaggtaccacttgatttcatatgggaaattgaagcaggaaatattgagggcttcttgatcacagaaaactcagaagagatagtaatgctcaggacaggagcggcagccccagaacaggccactcatttagaattctagtgtttcaaaacacttttgtgtgttgtatggtcaataacatttttcattactgatggtgtcattcacccattaggtaaacattcccttttaaatgtttgtttgttttttgagacaggatctcactctgttgccagggctgtagtgcagtggtgtgatcatagctcactgcaacctccacctcccaggctcaagcctcccgaatagctgggactacaggcgcacaccaccatccccggctaatttttgtattttttgtagagacggggttttgccatgttgccaaggctggtttcaaactcctggactcaagaaatccacccacctcagcctcccaaagtgctaggattacaggcatgagccactgcgcccagcccttataaatttttgtatagacattcctttggttggaagaatatttataggcaatacagtcaaagtttcaaaatagcatcacacaaaacatgtttataaatgaacaggatgtaatgtacatagatgacattaagaaaatttgtatgaaataatttagtcatcatgaaatatttagttgtcatataaaaacccactgtttgagaatgatgctactctgatctaatgaatgtgaacatgtagatgttttgtgtgtatttttttaaatgaaaactcaaaataagacaagtaatttgttgataaatatttttaaagataactcagcatgtttgtaaagcaggatacattttactaaaaggttcattggttccaatcacagctcataggtagagcaaagaaagggtggatggattgaaaagattagcctctgtctcggtggcaggttcccacctcgcaagcaattggaaacaaaacttttggggagttttattttgcattagggtgtgttttatgttaagcaaaacatactttagaaacaaatgaaaaaggcaattgaaaatcccagctatttcacctagatggaatagccaccctgagcagaactttgtgatgcttcattctgtggaattttgtgcttgctactgtatagtgcatgtggtgtaggttactctaactggttttgtcgacgtaaacatttaaagtgttatattttttataaaaatgtttatttttaatgatatgagaaaaattttgttaggccacaaaaacactgcactgtgaacattttagaaaaggtatgtcagactgggattaatgacagcatgattttcaatgactgtaaattgcgataaggaaatgtactgattgccaatacaccccaccctcattacatcatcaggacttgaagccaagggttaacccagcaagctacaaagagggtgtgtcacactgaaactcaatagttgagtttggctgttgttgcaggaaaatgattataactaaaagctctctgatagtgcagagacttaccagaagacacaaggaattgtactgaagagctattacaatccaaatattgccgtttcataaatgtaataagtaatactaattcacagagtattgtaaatggtggatgacaaaagaaaatctgctctgtggaaagaaagaactgtctctaccagggtcaagagcatgaacgcatcaatagaaagaactcggggaaacatcccatcaacaggactacacacttgtatatacattcttgagaacactgcaatgtgaaaatcacgtttgctatttataaacttgtccttagattaatgtgtctggacagattgtgggagtaagtgattcttctaagaattagatacttgtcactgcctatacctgcagctgaactgaatggtacttcgtatgttaatagttgttctgataaatcatgcaattaaagtaaagtgatgcaacatcttgtaaaaaaaaaaaaaaaaaaaa

SEQ ID NO: 34 - protein, 1390 aa, Homo sapiens
  ref <308>: DATABASE ACCESSION NUMBER: GenBank No. NP000236
  ref <309>: DATABASE ENTRY DATE: 2004-10-28
MKAPAVLAPGILVLLFTLVQRSNGECKEALAKSEMNVNMKYQLPNFTAETPIQNVILHEHHIFLGATNYIYVLNEEDLQKVAEYKTGPVLEHPDCFPCQDCSSKANLSGGVWKDNINMALVVDTYYDDQLISCGSVNRGTCQRHVFPHNHTADIQSEVHCIFSPQIEEPSQCPDCVVSALGAKVLSSVKDRFINFFVGNTINSSYFPDHPLHSISVRRLKETKDGFMFLTDQSYIDVLPEFRDSYPIKYVHAFESNNFIYFLTVQRETLDAQTFHTRIIRFCSINSGLHSYMEMPLECILTEKRKKRSTKKEVFNILQAAYVSKPGAQLARQIGASLNDDILFGVFAQSKPDSAEPMDRSAMCAFPIKYVNDFFNKIVNKNNVRCLQHFYGPNHEHCFNRTLLRNSSGCEARRDEYRTEFTTALQRVDLFMGQFSEVLLTSISTFIKGDLTIANLGTSEGRFMQVVVSRSGPSTPHVNFLLDSHPVSPEVIVEHTLNQNGYTLVITGKKITKIPLNGLGCRHFQSCSQCLSAPPFVQCGWCHDKCVRSEECLSGTWTQQICLPAIYKVFPNSAPLEGGTRLTICGWDFGFRRNNKFDLKKTRVLLGNESCTLTLSESTMNTLKCTVGPAMNKHFNMSIIISNGHGTTQYSTFSYVDPVITSISPKYGPMAGGTLLTLTGNYLNSGNSRHISIGGKTCTLKSVSNSILECYTPAQTISTEFAVKLKIDLANRETSIFSYREDPIVYEIHPTKSFISGGSTITGVGKNLNSVSVPRMVINVHEAGRNFTVACQHRSNSEIICCTTPSLQQLNLQLPLKTKAFFMLDGILSKYFDLIYVHNPVFKPFEKPVMISMGNENVLEIKGNDIDPEAVKGEVLKVGNKSCENIHLHSEAVLCTVPNDLLKLNSELNIEWKQAISSTVLGKVIVQPDQNFTGLIAGVVSISTALLLLLGFFLWLKKRKQIKDLGSELVRYDARVHTPHLDRLVSARSVSPTTEMVSNESVDYRATFPEDQFPNSSQNGSCRQVQYPLTDMSPILTSGDSDISSPLLQNTVHIDLSALNPELVQAVQHVVIGPSSLIVHFNEVIGRGHFGCVYHGTLLDNDGKKIHCAVKSLNRITDIGEVSQFLTEGIIMKDFSHPNVLSLLGICLRSEGSPLVVLPYMKHGDLRNFIRNETHNPTVKDLIGFGLQVAKGMKYLASKKFVHRDLAARNCMLDEKFTVKVADFGLARDMYDKEYYSVHNKTGAKLPVKWMALESLQTQKFTTKSDVWSFGVLLWELMTRGAPPYPDVNTFDITVYLLQGRRLLQPEYCPDPLYEVMLKCWHPKAEMRPSFSELVSRISAIFSTFIGEHYVHVNATYVNVKCVAPYPSLLSSEDNADDEVDTRPASFWETS

SEQ ID NO: 35 - protein, 1390 aa, Homo sapiens
  VARIANT 37, 145, 158, 237: Xaa = V or A
  VARIANT 39, 1250: Xaa = M or T
  VARIANT 42: Xaa = Q or R
  VARIANT 113, 508: Xaa = K or R
  VARIANT 114, 382: Xaa = D or N
  VARIANT 148, 476, 1094: Xaa = H or R
  VARIANT 151: Xaa = T or P
  VARIANT 168: Xaa = E or D
  VARIANT 193: Xaa = I or T
  VARIANT 216: Xaa = V or L
  VARIANT 276, 511, 729: Xaa = T or A
  VARIANT 314: Xaa = F or L
  VARIANT 337: Xaa = L or P
  VARIANT 340: Xaa = D or V
  VARIANT 400: Xaa = R or G
  VARIANT 481: Xaa = L or M
  VARIANT 500: Xaa = D or G
  VARIANT 501, 542: Xaa = Y or H
  VARIANT 622: Xaa = L or S
  VARIANT 720: Xaa = F or S
  VARIANT 1100: Xaa = N or Y
  VARIANT 1230: Xaa = C or Y
  VARIANT 1235: Xaa = Y or D
MKAPAVLAPGILVLLFTLVQRSNGECKEALAKSEMNXNXKYXLPNFTAETPIQNVILHEHHIFLGATNYIYVLNEEDLQKVAEYKTGPVLEHPDCFPCQDCSSKANLSGGVWXXNINMALVVDTYYDDQLISCGSVNRGTCQRHXFPXNHXADIQSEXHCIFSPQIEXPSQCPDCVVSALGAKVLSSVKDRFXNFFVGNTINSSYFPDHPLHSISXRRLKETKDGFMFLTDQSYIDXLPEFRDSYPIKYVHAFESNNFIYFLTVQRETLDAQTFHXRIIRFCSINSGLHSYMEMPLECILTEKRKKRSTKKEVXNILQAAYVSKPGAQLARQIGASXNDXILFGVFAQSKPDSAEPMDRSAMCAFPIKYVNDFFNKIVNKNXVRCLQHFYGPNHEHCFNXTLLRNSSGCEARRDEYRTEFTTALQRVDLFMGQFSEVLLTSISTFIKGDLTIANLGTSEGRFMQVVVSRSGPSTPXVNFLXDSHPVSPEVIVEHTLNQNXXTLVITGXKIXKIPLNGLGCRHFQSCSQCLSAPPFVQCGWCXDKCVRSEECLSGTWTQQICLPAIYKVFPNSAPLEGGTRLTICGWDFGFRRNNKFDLKKTRVLLGNESCTLTLSESTMNTXKCTVGPAMNKHFNMSIIISNGHGTTQYSTFSYVDPVITSISPKYGPMAGGTLLTLTGNYLNSGNSRHISIGGKTCTLKSVSNSILECYTPAQTISTEXAVKLKIDLXNRETSIFSYREDPIVYEIHPTKSFISGGSTITGVGKNLNSVSVPRMVINVHEAGRNFTVACQHRSNSEIICCXTPSLQQLNLQLPLKTKAFFMLDGILSKYFDLIYVHNPVFKPFEKPVMISMGNENVLEIKGNDIDPEAVKGEVLKVGNKSCENIHLHSEAVLCTVPNDLLKLNSELNIEWKQAISSTVLGKVIVQPDQNFTGLIAGVVSISTALLLLLGFFLWLKKRKQIKDLGSELVRYDARVHTPHLDRLVSARSVSPTTEMVSNESVDYRATFPEDQFPNSSQNGSCRQVQYPLTDMSPILTSGDSDISSPLLQNTVHIDLSALNPELVQAVQHVVIGPSSLIVHFNEVIGRGHFGCVYXGTLLDXDGKKIHCAVKSLNRITDIGEVSQFLTEGIIMKDFSHPNVLSLLGICLRSEGSPLVVLPYMKHGDLRNFIRNETHNPTVKDLIGFGLQVAKGMKYLASKKFVHRDLAARNCMLDEKFTVKVADFGLARDMXDKEYXSVHNKTGAKLPVKWXALESLQTQKFTTKSDVWSFGVLLWELMTRGAPPYPDVNTFDITVYLLQGRRLLQPEYCPDPLYEVMLKCWHPKAEMRPSFSELVSRISAIFSTFIGEHYVHVNATYVNVKCVAPYPSLLSSEDNADDEVDTRPASFWETS

SEQ ID NO: 36 - DNA, 984 bp, Homo Sapiens
  CDS (37)...(897): SR005A11
tgcccccacccccttaggcccgagggatcaggagctatgggaccagaggccctgtcatctttactgctgctgctcttggtggcaagtggagatgctgacatgaagggacattttgatcctgccaagtgccgctatgccctgggcatgcaggaccggaccatcccagacagtgacatctctgcttccagctcctggtcagattccactgccgcccgccacagcaggttggagagcagtgacggggatggggcctggtgccccgcagggtcggtgtttcccaaggaggaggagtacttgcaggtggatctacaacgactgcacctggtggctctggtgggcacccagggacggcatgccgggggcctgggcaaggagttctcccggagctaccggctgcgttactcccgggatggtcgccgctggatgggctggaaggaccgctggggtcaggaggtgatctcaggcaatgaggaccctgagggagtggtgctgaaggaccttgggccccccatggttgcccgactggttcgcttctacccccgggctgaccgggtcatgagcgtctgtctgcgggtagagctctatggctgcctctggagggatggactcctgtcttacaccgcccctgtggggcagacaatgtatttatctgaggccgtgtacctcaacgactccacctatgacggacataccgtgggcggactgcagtatgggggtctgggccagctggcagatggtgtggtggggctggatgactttaggaagagtcaggagctgcgggtctggccaggctatgactatgtgggatggagcaaccacagcttctccagtggctatgtggagatggagtttgagtttgaccggctgagggccttccaggctatgcagatgtggtgaacaattcctctccggcactgggaggcaccttcccgccagccccctggtggccgcctggcccacctcccaccaacttcagcagcttgg

SEQ ID NO: 37 - protein, 286 aa, Homo Sapiens [sequence omitted]

SEQ ID NO: 38 - DNA, 788 bp, Homo Sapiens
  CDS (37)...(768): SR005A10
tgcccccacccccttaggcccgagggatcaggagctatgggaccagaggccctgtcatctttactgctgctgctcttggtggcaagtggagatgctgacatgaagggacattttgatcctgccaagtgccgctatgccctgggcatgcaggaccggaccatcccagacagtgacatctctgcttccagctcctggtcagattccactgccgcccgccacagcaggttggagagcagtgacggggatggggcctggtgccccgcagggtcggtgtttcccaaggaggaggagtacttgcaggtggatctacaacgactgcacctggtggctctggtgggcacccagggacggcatgccgggggcctgggcaaggagttctcccggagctaccggctgcgttactcccgggatggtcgccgctggatgggctggaaggaccgctggggtcaggaggtgatctcaggcaatgaggaccctgagggagtggtgctgaaggaccttgggccccccatggttgcccgactggttcgcttctacccccgggctgaccgggtcatgagcgtctgtctgcgggtagagctctatggctgcctctggagggactgcagtatgggggtctgggccagctggcagatggtgtggtggggctggatgactttaggaagagtcaggagctgcgggtctggccaggctatgactatgtgggatggagcaaccacagcttctccagtggctatgtggagatggagtttgagtttgaccggctgagggccttccaggctatgcag

SEQ ID NO: 39 - protein, 243 aa, Homo Sapiens
  SR005A10
MGPEALSSLLLLLLVASGDADMKGHFDPAKCRYALGMQDRTIPDSDISASSSWSDSTAARHSRLESSDGDGAWCPAGSVFPKEEEYLQVDLQRLHLVALVGTQGRHAGGLGKEFSRSYRLRYSRDGRRWMGWKDRWGQEVISGNEDPEGVVLKDLGPPMVARLVRFYPRADRVMSVCLRVELYGCLWRDCSMGVWASWQMVWWGWMTLGRVRSCGSGQAMTMWDGATTASPVAMWRWSLSLTG

SEQ ID NO: 40 - protein, 444 aa, Homo sapiens
  DDR1.h
MGPEALSSLLLLLLVASGDADMKGHFDPAKCRYALGMQDRTIPDSDISASSSWSDSTAARHSRLESSDGDGAWCPAGSVFPKEEEYLQVDLQRLHLVALVGTQGRHAGGLGKEFSRSYRLRYSRDGRRWMGWKDRWGQEVISGNEDPEGVVLKDLGPPMVARLVRFYPRADRVMSVCLRVELYGCLWRDGLLSYTAPVGQTMYLSEAVYLNDSTYDGHTVGGLQYGGLGQLADGVVGLDDFRKSQELRVWPGYDYVGWSNHSFSSGYVEMEFEFDRLRAFQAMQVHCNNMHTLGARLPGGVECRFRRGPAMAWEGEPMRHNLGGNLGDPRARAVSVPLGGRVARFLQCRFCPHLPRTASPIMPRLTLLPCRASPGATPMLCLHCPQGQSGMGPPEWISLDLDSASRRSLARASLGRCTCVRSTALKIWLVLISPLMCVRDTLCW

SEQ ID NO: 41 - DNA, 1683 bp, Homo Sapiens
  CDS (20)...(1444): SR004G03
caggtcccggcccggagctatggagcggcgctggcccctggggctagggctggtgctgctgctctgcgccccgctgcccccgggggcgcgcgccaaggaagttactctgatggacacaagcaaggcacagggagagctgggctggctgctggatcccccaaaagatgggtggagtgaacagcaacagatactgaatgggacacccctgtacatgtaccaggactgcccaatgcaaggacgcagagacactgaccactggcttcgctccaattggatctaccgcggggaggaggcttcccgcgtccacgtggagctgcagttcaccgtgcgggactgcaagagtttccctgggggagccgggcctctgggctgcaaggagaccttcaaccttctgtacatggagagtgaccaggatgtgggcattcagctccgacggcccttgttccagaaggtaaccacggtggctgcagaccagagcttcaccattcgagaccttgtgtctggctccgtgaagctgaatgtggagcgctgctctctgggccgcctgacccgccgtggcctctacctcgctttccacaacccgggtgcctgtgtggccctggtgtctgtccgggtcttctaccagcgctgtcctgagaccctgaatggcttggcccaattcccagacactctgcctggccccgctgggttggtggaagtggcggggacctgcttgccccacgcgcgggccagccccaggccctcaggtgcaccccgcatgcactgcagccctgatggcgagtggctggtgcctgtaggacggtgccactgtgagcctggctatgaggaaggtggcagtggcgaagcatgtgttgcctgccctagcggctcctaccggatggacatggacacaccccattgtctcacgtgcccccagcagagcactgctgagtctgagggggccaccatctgtacctgtgagagcggccattacagagctcccggggagggcccccaggtggcatgcacaggtcccccctcggccccccgaaacctgagcttctctgcctcagggactcagctctccctgcgttgggaacccccagcagatacggggggacgccaggatgtcagatacagtgtgaggtgttcccagtgtcagggcacagcacaggacggggggccctgccagccctgtggggtgggcgtgcacttctcgccgggggcccgggggctcaccacacctgcagtgcatgtcaatggccttgaaccttatgccaactacacctttaatgtggaagcccaaaatggagtgtcagggctgggcagctctggccatgccagcacctcagtcagcatcagcatggggcatgcaggtgagaggctgagaggggctgggacagggacctggtggagacagaagggcttaagaccacagaacaaactgatgggcaggaagccatagaaaagttactaaggttatttcctttttccttacatatccaaccttatccctctggacccccagagtcactgtcaggcctgtctctgagactggtgaagaaagaaccgaggcaactagagctgacctgggcggggtcccggccccgaagccctggggcgaacctgacctatgagctgcacgtgctgaaccaggatgaagaacggtaccagatggttctagaacccagggtcttgctgaca

SEQ ID NO: 42 - protein, 474 aa, Homo Sapiens
  SR004G03
MERRWPLGLGLVLLLCAPLPPGARAKEVTLMDTSKAQGELGWLLDPPKDGWSEQQQILNGTPLYMYQDCPMQGRRDTDHWLRSNWIYRGEEASRVHVELQFTVRDCKSFPGGAGPLGCKETFNLLYMESDQDVGIQLRRPLFQKVTTVAADQSFTIRDLVSGSVKLNVERCSLGRLTRRGLYLAFHNPGACVALVSVRVFYQRCPETLNGLAQFPDTLPGPAGLVEVAGTCLPHARASPRPSGAPRMHCSPDGEWLVPVGRCHCEPGYEEGGSGEACVACPSGSYRMDMDTPHCLTCPQQSTAESEGATICTCESGHYRAPGEGPQVACTGPPSAPRNLSFSASGTQLSLRWEPPADTGGRQDVRYSVRCSQCQGTAQDGGPCQPCGVGVHFSPGARGLTTPAVHVNGLEPYANYTFNVEAQNGVSGLGSSGHASTSVSISMGHAGERLRGAGTGTWWRQKGLRPQNKLMGRKP

SEQ ID NO: 43 - DNA, 1375 bp, Homo Sapiens
  CDS (20)...(955): SR004G07
caggtcccggcccggagctatggagcggcgctggcccctggggctagggctggtgctgctgctctgcgccccgctgcccccgggggcgcgcgccaaggaagttactctgatggacacaagcaaggcacagggagagctgggctggctgctggatcccccaaaagatgggtggagtgaacagcaacagatactgaatgggacacccctgtacatgtaccaggactgcccaatgcaaggacgcagagacactgaccactggcttcgctccaattggatctaccgcggggaggaggcttcccgcgtccacgtggagctgcagttcaccgtgcgggactgcaagagtttccctgggggagccgggcctctgggctgcaaggagaccttcaaccttctgtacatggagagtgaccaggatgtgggcattcagctccgacggcccttgttccagaaggtaaccacggtggctgcagaccagagcttcaccattcgagaccttgtgtctggctccgtgaagctgaatgtggagcgctgctctctgggccgcctgacccgccgtggcctctacctcgctttccacaacccgggtgcctgtgtggccctggtgtctgtccgggtcttctaccagcgctgtcctgagaccctgaatggcttggcccaattcccagacactctgcctggccccgctgggttggtggaagtggcggggacctgcttgccccacgcgcgggccagccccaggccctcaggtgcaccccgcatgcactgcagccctgatggcgagtggctggtgcctgtaggacggtgccactgtgagcctggctatgaggaaggtggcagtggcgaagcatgtgttggtaagaacggaggcggtgagaacctgaggaaccactcgggaggattgcaggagtaccccggcagagaaggaggccagtgctccgcctcagtgggtttttaacctgagtgtcccagagcagcggacacacacatgcagagatgtttccagtagaagggattggggcaggaaggggtggtggtggttctgcctgtaaaaacatttacagaaccactgctctgctgcgttctctctccagcctgccctagcggctcctaccggatggacatggacacaccccattgtctcacgtgcccccagcagagcactgctgagtctgagggggccaccatctgtacctgtgagagcggccattacagagctcccggggagggcccccaggtggcatgcacagagtcactgtcaggcctgtctctgagactggtgaagaaagaaccgaggcaactagagctgacctgggcggggtcccggccccgaagccctggggcgaacctgacctatgagctgcacgtgctgaaccag

SEQ ID NO: 44 - protein, 311 aa, Homo Sapiens
  SR004G07
MERRWPLGLGLVLLLCAPLPPGARAKEVTLMDTSKAQGELGWLLDPPKDGWSEQQQILNGTPLYMYQDCPMQGRRDTDHWLRSNWIYRGEEASRVHVELQFTVRDCKSFPGGAGPLGCKETFNLLYMESDQDVGIQLRRPLFQKVTTVAADQSFTIRDLVSGSVKLNVERCSLGRLTRRGLYLAFHNPGACVALVSVRVFYQRCPETLNGLAQFPDTLPGPAGLVEVAGTCLPHARASPRPSGAPRMHCSPDGEWLVPVGRCHCEPGYEEGGSGEACVGKNGGGENLRNHSGGLQEYPGREGGQCSASVGF

SEQ ID NO: 45 - DNA, 1511 bp, Homo Sapiens
  CDS (20)...(1492): SR004H03
caggtcccggcccggagctatggagcggcgctggcccctggggctagggctggtgctgctgctctgcgccccgctgcccccgggggcgcgcgccaaggaagttactctgatggacacaagcaaggcacagggagagctgggctggctgctggatcccccaaaagatgggtggagtgaacagcaacagatactgaatgggacacccctgtacatgtaccaggactgcccaatgcaaggacgcagagacactgaccactggcttcgctccaattggatctaccgcggggaggaggcttcccgcgtccacgtggagctgcagttcaccgtgcgggactgcaagagtttccctgggggagccgggcctctgggctgcaaggagaccttcaaccttctgtacatggagagtgaccaggatgtgggcattcagctccgacggcccttgttccagaaggtaaccacggtggctgcagaccagagcttcaccattcgagaccttgtgtctggctccgtgaagctgaatgtggagcgctgctctctgggccgcctgacccgccgtggcctctacctcgctttccacaacccgggtgcctgtgtggccctggtgtctgtccgggtcttctaccagcgctgtcctgagaccctgaatggcttggcccaattcccagacactctgcctggccccgctgggttggtggaagtggcggggacctgcttgccccacgcgcgggccagccccaggccctcaggtgcaccccgcatgcactgcagccctgatggcgagtggctggtgcctgtaggacggtgccactgtgagcctggctatgaggaaggtggcagtggcgaagcatgtgttgcctgccctagcggctcctaccggatggacatggacacaccccattgtctcacgtgcccccagcagagcactgctgagtctgagggggccaccatctgtacctgtgagagcggccattacagagctcccggggagggcccccaggtggcatgcacaggtcccccctcggccccccgaaacctgagcttctctgcctcagggactcagctctccctgcgttgggaacccccagcagatacggggggacgccaggatgtcagatacagtgtgaggtgttcccagtgtcagggcacagcacaggacggggggccctgccagccctgtggggtgggcgtgcacttctcgccgggggcccgggggctcaccacacctgcagtgcatgtcaatggccttgaaccttatgccaactacacctttaatgtggaagcccaaaatggagtgtcagggctgggcagctctggccatgccagcacctcagtcagcatcagcatggggcatgcagatccaaccttatccctctggacccccagagtcactgtcaggcctgtctctgagactggtgaagaaagaaccgaggcaactagagctgacctgggcggggtcccggccccgaagccctggggcgaacctgacctatgagctgcacgtgctgaaccag

SEQ ID NO: 46 - protein, 490 aa, Homo Sapiens
  SR004H03
MERRWPLGLGLVLLLCAPLPPGARAKEVTLMDTSKAQGELGWLLDPPKDGWSEQQQILNGTPLYMYQDCPMQGRRDTDHWLRSNWIYRGEEASRVHVELQFTVRDCKSFPGGAGPLGCKETFNLLYMESDQDVGIQLRRPLFQKVTTVAADQSFTIRDLVSGSVKLNVERCSLGRLTRRGLYLAFHNPGACVALVSVRVFYQRCPETLNGLAQFPDTLPGPAGLVEVAGTCLPHARASPRPSGAPRMHCSPDGEWLVPVGRCHCEPGYEEGGSGEACVACPSGSYRMDMDTPHCLTCPQQSTAESEGATICTCESGHYRAPGEGPQVACTGPPSAPRNLSFSASGTQLSLRWEPPADTGGRQDVRYSVRCSQCQGTAQDGGPCQPCGVGVHFSPGARGLTTPAVHVNGLEPYANYTFNVEAQNGVSGLGSSGHASTSVSISMGHADPTLSLWTPRVTVRPVSETGEERTEATRADLGGVPAPKPWGEPDL

SEQ ID NO: 47 - protein, 166 aa, Homo sapiens
  EPHA1.b
MDTSKAQGELGWLLDPPKDGWSEQQQILNGTPLYMYQDCPMQGRRDTDHWLRSNWIYRGEEASRVHVELQFTVRDCKSFPGGAGPLGCKETFNLLYMESDQDVGIQLRRPLFQKVLLPSMPSGSWCRSLVAPYWVPEKVAETGRGCRGRILKRIWRLKAGHGGLCL

SEQ ID NO: 48 - DNA, 1721 bp, Homo Sapiens
  SR016E12
ctctctggctactagagacccactgcttactggcttatcgaaattaatacgactcactatagggagacccaagctggctagttaagcttggtaccgagctcggatccaccatggagctccaggcagcccgcgcctgcttcgccctgctgtggggctgtgcgctggccgcggccgcggcggcgcagggcaaggaagtggtactgctggactttgctgcagctggaggggagctcggctggctcacacacccgtatggcaaagggtgggacctgatgcagaacatcatgaatgacatgccgatctacatgtactccgtgtgcaacgtgatgtctggcgaccaggacaactggctccgcaccaactgggtgtaccgaggagaggctgagcgtatcttcattgagctcaagtttactgtacgtgactgcaacagcttccctggtggcgccagctcctgcaaggagactttcaacctctactatgccgagtcggacctggactacggcaccaacttccagaagcgcctgttcaccaagattgacaccattgcgcccgatgagatcaccgtcagcagcgacttcgaggcacgccacgtgaagctgaacgtggaggagcgctccgtggggccgctcacccgcaaaggcttctacctggccttccaggatatcggtgcctgtgtggcactactctccgtccgtgtctactacgagaagtgccccgagccgctgcagggcctggcccacttccctgagaccatcgccggctctgatgcaccttccctggccactgtggccggcacctgtgtggaccatgccgtggtgccaccggggggtgaagagccccgtatgcactgtgcagtggatggcgagtggctggtgcccattgggcagtgcctgtgccaggcaggctacgagaaggtggaggatgcctgccaggcctgctcgcctggattttttaagtttgaggcatccgagagcccctgcttggagtgccctgagcgcacgctgccatcccctgagggtgccacctcctgcgagtgtgaggaaggcttcttccgggcacctcaggacccagcgtcgatgccttgcacacgacccccttccgccccacactacctcacagccgtgggcatgggtgccaaggtggagctgcgctggacgccccctcaggacagcgggggccgcgaggacattgtctacagcgtcacctgcgaacagtgctggcccgagtctggggaatgcgggccgtgtgaggccagtgtgcgctactcggagcctcctcacggactgacccgcaccagtgtgacagtgagcgacctggagccccacatgaactacaccttcaccgtggaggcccgcaatggcgtctcaggcctggtaaccagccgcagcttccgtactgccagtgtcagcatcaaccagacagagccccccaaggtgaggctggagggccgcagcaccacctcgcttagcgtctcctggagcatccccccgccgcagcagagccgagtgtggaagtacgaggtcacttaccgcaagaaggtaactcccagaggggcggggctggctctagctgggccgacagcaggggacaggctggtcacactcgagtctagagggcccttcgaacaaaaactcatctcagaagaggatctgaatatgcataccggtcatcatcaccatcaccattgagtttaaacccgctgatcagcctcgactgtgcct

SEQ ID NO: 49 - protein, 497 aa, Homo Sapiens
  SR016E12
MELQAARACFALLWGCALAAAAAAQGKEVVLLDFAAAGGELGWLTHPYGKGWDLMQNIMNDMPIYMYSVCNVMSGDQDNWLRTNWVYRGEAERIFIELKFTVRDCNSFPGGASSCKETFNLYYAESDLDYGTNFQKRLFTKIDTIAPDEITVSSDFEARHVKLNVEERSVGPLTRKGFYLAFQDIGACVALLSVRVYYEKCPEPLQGLAHFPETIAGSDAPSLATVAGTCVDHAVVPPGGEEPRMHCAVDGEWLVPIGQCLCQAGYEKVEDACQACSPGFFKFEASESPCLECPERTLPSPEGATSCECEEGFFRAPQDPASMPCTRPPSAPHYLTAVGMGAKVELRWTPPQDSGGREDIVYSVTCEQCWPESGECGPCEASVRYSEPPHGLTRTSVTVSDLEPHMNYTFTVEARNGVSGLVTSRSFRTASVSINQTEPPKVRLEGRSTTSLSVSWSIPPPQQSRVWKYEVTYRKKVTPRGAGLALAGPTAGDRLVT

SEQ ID NO: 50 - protein, 495 aa, Homo Sapiens
  EPHA8.b
MAPARGRLPPALWVVTAAAAAATCVSAARGEVNLLDTSTIHGDWGWLTYPAHGWDSINEVDESFQPIHTYQVCNVMSPNQNNWLRTSWVPRDGARRVYAEIKFTLRDCNSMPGVLGTCKETFNLYYLESDRDLGASTQESQFLKIDTIAADESFTGADLGVRRLKLNTEVRSVGPLSKRGFYLAFQDIGACLAILSLRIYYKKCPAMVRNLAAFSEAVTGADSSSLVEVRGQCVRHSEERDTPKMYCSAEGEWLVPIGKCVCSAGYEERRDACVACELGFYKSAPGDQLCARCPPHSHSAAPAAQACHCDLSYYRAALDPPSSACTRPPSAPVNLISSVNGTSVTLEWAPPLDPGGRSDITYNAVCRRCPWALSRCEACGSGTRFVPQQTSLVQASLLVANLLAHMNYSFWIEAVNGVSDLSPEPRRAAVVNITTNQAGRRRNSVPQRPGPPASPASDPSRDQSSAGDVLWAFRQVPLWPCAPHQDPELEALHCL

SEQ ID NO: 51 - DNA, 1107 bp, Homo Sapiens
  CDS (20)...(748): SR005D06
tgcgggccgtcggccggcgatggccctggattatctactactgctcctcctggcatccgcagtggctgcgatggaagaaacgttaatggacaccagaacggctactgcagagctgggctggacggccaatcctgcgtccgggtgggaagaagtcagtggctacgatgaaaacctgaacaccatccgcacctaccaggtgtgcaatgtcttcgagcccaaccagaacaattggctgctcaccaccttcatcaaccggcggggggcccatcgcatctacacagagatgcgcttcactgtgagagactgcagcagcctccctaatgtcccaggatcctgcaaggagaccttcaacttgtattactatgagactgactctgtcattgccaccaagaagtcagccttctggtctgaggccccctacctcaaagtagacaccattgctgcagatgagagcttctcccaggtggactttgggggaaggctgatgaagcttgccctgcagggacattcaaggccagccaggaagctgaaggctgctcccactgcccctccaacagccgctcccctgcagaggcgtctcccatctgcacctgtcggaccggttattaccgagcggactttgaccctccagaagtggcatgcactagcgtcccatcaggtccccgcaatgttatctccatcgtcaatgagacgtccatcattctggagtggcaccctccaagggagacaggtgggcgggatgatgtgacctacaacatcatctgcaaaaagtgccgggcagaccgccggagctgctcccgctgtgacgacaatgtggagtttgtgcccaggcagctgggcctgacggagtgccgcgtctccatcagcagcctgtgggcccacaccccctacacctttgacatccaggccatcaatggagtctccagcaagagtcccttccccccacagcacgtctctgtcaacatcaccacaaaccaagccgccccctccaccgttcccatcatgcaccaagtcagtgccactatgaggagcatcaccttgtcatggccacagccggagcagcccaatggcatcatcctggactatgagatccggtactatgagaag

SEQ ID NO: 52 - protein, 242 aa, Homo Sapiens
  SR005D06
MALDYLLLLLLASAVAAMEETLMDTRTATAELGWTANPASGWEEVSGYDENLNTIRTYQVCNVFEPNQNNWLLTTFINRRGAHRIYTEMRFTVRDCSSLPNVPGSCKETFNLYYYETDSVIATKKSAFWSEAPYLKVDTIAADESFSQVDFGGRLMKLALQGHSRPARKLKAAPTAPPTAAPLQRRLPSAPVGPVITERTLTLQKWHALASHQVPAMLSPSSMRRPSFWSGTLQGRQVGGMM

SEQ ID NO: 53 - DNA, 1353 bp, Homo Sapiens
  SR012C08
agtcccgcgcggagtatcggcgtccacccgcccagggagagtcagacctgggggggcgagggccccccaaactcagttcggatcctacccgagtgaggcggcgccatggagctccgggtgctgctctgctgggcttcgttggccgcagctttggaagagaccctgctgaacacaaaattggaaactgctgatctgaagtgggtgacattccctcaggtggacgggcagtgggaggaactgagcggcctggatgaggaacagcacagcgtgcgcacctacgaagtgtgtgacgtgcagcgtgccccgggccaggcccactggcttcgcacaggttgggtcccacggcggggcgccgtccacgtgtacgccacgctgcgcttcaccatgctcgagtgcctgtccctgcctcgggctgggcgctcctgcaaggagaccttcaccgtcttctactatgagagcgatgcggacacggccacggccctcacgccagcctggatggagaacccctacatcaaggtggacacggtggccgcggagcatctcacccggaagcgccctggggccgaggccaccgggaaggtgaatgtcaagacgctgcgtctgggaccgctcagcaaggctggcttctacctggccttccaggaccagggtgcctgcatggccctgctatccctgcacctcttctacaaaaagtgcgcccagctgactgtgaacctgactcgattcccggagactgtgcctcgggagctggttgtgcccgtggccggtagctgcgtggtggatgccgtccccgcccctggccccagccccagcctctactgccgtgaggatggccagtgggccgaacagccggtcacgggctgcagctgtgctccggggttcgaggcagctgaggggaacaccaagtgccgagggcgccgagggtcccagcagcgtgcggttcctgaagacgtcagaaaaccgggcagagctgcgggggctgaagcggggagccagctacctggtgcaggtacgggcgcgctctgaggccggctacgggcccttcggccaggaacatcacagccagacccaactggatgagagcgagggctggcgggagcagctggccctgattgcgggcacggcagtcgtgggtgtggtcctggtcctggtggtcattgtggtcgcagttctctgcctcaggaagcagagcaatgggagagaagcagaatattcggacaaacacggacagtatctcatcggacatggtactaaggtctacatcgaccccttcacttatgaagaccctaatgaggctgtgagggaatttgcaaaagagatcgatgtctcctacgtcaagattgaagaggtgat

SEQ ID NO: 54 - protein, 306 aa, Homo Sapiens
  SR012C08
MELRVLLCWASLAAALEETLLNTKLETADLKWVTFPQVDGQWEELSGLDEEQHSVRTYEVCDVQRAPGQAHWLRTGWVPRRGAVHVYATLRFTMLECLSLPRAGRSCKETFTVFYYESDADTATALTPAWMENPYIKVDTVAAEHLTRKRPGAEATGKVNVKTLRLGPLSKAGFYLAFQDQGACMALLSLHLFYKKCAQLTVNLTRFPETVPRELVVPVAGSCVVDAVPAPGPSPSLYCREDGQWAEQPVTGCSCAPGFEAAEGNTKCRGRRGSQQRAVPEDVRKPGRAAGAEAGSQLPGAGTGAL

SEQ ID NO: 55 - DNA, 1813 bp, Homo Sapiens
  SR012D11
actcagttcggatcctacccgagtgaggcggcgccatggagctccgggtgctgctctgctgggcttcgttggccgcagctttggaagagaccctgctgaacacaaaattggaaactgctgatctgaagtgggtgacattccctcaggtggacgggcagtgggaggaactgagcggcctggatgaggaacagcacagcgtgcgcacctacgaagtgtgtgacgtgcagcgtgccccgggccaggcccactggcttcgcacaggttgggtcccacggcggggcgccgtccacgtgtacgccacgctgcgcttcaccatgctcgagtgcctgtccctgcctcgggctgggcgctcctgcaaggagaccttcaccgtcttctactatgagagcgatgcggacacggccacggccctcacgccagcctggatggagaacccctacatcaaggtggacacggtggccgcggagcatctcacccggaagcgccctggggccgaggccaccgggaaggtgaatgtcaagacgctgcgtctgggaccgctcagcaaggctggcttctacctggccttccaggaccagggtgcctgcatggccctgctatccctgcacctcttctacaaaaagtgcgcccagctgactgtgaacctgactcgattcccggagactgtgcctcgggagctggttgtgcccgtggccggtagctgcgtggtggatgccgtccccgcccctggccccagccccagcctctactgccgtgaggatggccagtgggccgaacagccggtcacgggctgcagctgtgctccggggttcgaggcagctgaggggaacaccaagtgccgagcctgtgcccagggcaccttcaagcccctgtcaggagaagggtcctgccagccatgcccagccaatagccactctaacaccattggatcagccgtctgccagtgccgcgtcgggtacttccgggcacgcacagacccccggggtgcaccctgcaccacccctccttcggctccgcggagcgtggtttcccgcctgaacggctcctccctgcacctggaatggagtgcccccctggagtctggtggccgagaggacctcacctacgccctccgctgccgggagtgccgacccggaggctcctgtgcgccctgcgggggagacctgacttttgaccccggcccccgggacctggtggagccctgggtggtggttcgagggctacgtcctgacttcacctatacctttgaggtcactgcattgaacggggtatcctccttagccacggggcccgtcccatttgagcctgtcaatgtcaccactgaccgagaggtacctcctgcagtgtctgacatccgggtgacgcggtcctcacccagcagcttgagcctggcctgggctgttccccgggcacccagtggggctgtgctggactacgaggtcaaataccatgagaagggcgccgagggtcccagcagcgtgcggttcctgaagacgtcagaaaaccgggcagagctgcgggggctgaagcggggagccagctacctggtgcagagagcgagggctggcgggagcagctggccctgattgcgggcacggcagtcgtgggtgtggtcctggtcctggtggtcattgtggtcgcagttctctgcctcaggaagcagagcaatgggagagaagcagaatattcggacaaacacggacagtatctcatcggacatggtactaaggtctacatcgaccccttcacttatgaagaccctaatgaggctgtgagggaatttgcaaaagagatcgatgtctcctacgtcaag

SEQ ID NO: 56 - protein, 516 aa, Homo Sapiens
  SR012D11
MELRVLLCWASLAAALEETLLNTKLETADLKWVTFPQVDGQWEELSGLDEEQHSVRTYEVCDVQRAPGQAHWLRTGWVPRRGAVHVYATLRFTMLECLSLPRAGRSCKETFTVFYYESDADTATALTPAWMENPYIKVDTVAAEHLTRKRPGAEATGKVNVKTLRLGPLSKAGFYLAFQDQGACMALLSLHLFYKKCAQLTVNLTRFPETVPRELVVPVAGSCVVDAVPAPGPSPSLYCREDGQWAEQPVTGCSCAPGFEAAEGNTKCRACAQGTFKPLSGEGSCQPCPANSHSNTIGSAVCQCRVGYFRARTDPRGAPCTTPPSAPRSVVSRLNGSSLHLEWSAPLESGGREDLTYALRCRECRPGGSCAPCGGDLTFDPGPRDLVEPWVVVRGLRPDFTYTFEVTALNGVSSLATGPVPFEPVNVTTDREVPPAVSDIRVTRSSPSSLSLAWAVPRAPSGAVLDYEVKYHEKGAEGPSSVRFLKTSENRAELRGLKRGASYLVQRARAGGSSWP

SEQ ID NO: 57 - DNA, 1801 bp, Homo Sapiens
  SR012E11
actcagttcggatcctacccgagtgaggcggcgccatggagctccgggtgctgctctgctgggcttcgttggccgcagctttggaagagaccctgctgaacacaaaattggaaactgctgatctgaagtgggtgacattccctcaggtggacgggcagtgggaggaactgagcggcctggatgaggaacagcacagcgtgcgcacctacgaagtgtgtgacgtgcagcgtgccccgggccaggcccactggcttcgcacaggttgggtcccacggcggggcgccgtccacgtgtacgccacgctgcgcttcaccatgctcgagtgcctgtccctgcctcgggctgggcgctcctgcaaggagaccttcaccgtcttctactatgagagcgatgcggacacggccacggccctcacgccagcctggatggagaacccctacatcaaggtggacacggtggccgcggagcatctcacccggaagcgccctggggccgaggccaccgggaaggtgaatgtcaagacgctgcgtctgggaccgctcagcaaggctggcttctacctggccttccaggaccagggtgcctgcatggccctgctatccctgcacctcttctacaaaaagtgcgcccagctgactgtgaacctgactcgattcccggagactgtgcctcgggagctggttgtgcccgtggccggtagctgcgtggtggatgccgtccccgcccctggccccagccccagcctctactgccgtgaggatggccagtgggccgaacagccggtcacgggctgcagctgtgctccggggttcgaggcagctgaggggaacaccaagtgccgagcctgtgcccagggcaccttcaagcccctgtcaggagaagggtcctgccagccatgcccagccaatagccactctaacaccattggatcagccgtctgccagtgccgcgtcgggtacttccgggcacgcacagacccccggggtgcaccctgcaccacccctccttcggctccgcggagcgtggtttcccgcctgaacggctcctccctgcacctggaatggagtgcccccctggagtctggtggccgagaggacctcacctacgccctccgctgccgggagtgccgacccggaggctcctgtgcgccctgcgggggagacctgacttttgaccccggcccccgggacctggtggagccctgggtggtggttcgagggctacgtcctgacttcacctatacctttgagtacctcctgcagtgtctgacatccgggtgacgcggtcctcacccagcagcttgagcctggcctgggctgttccccgggcacccagtggggctgtgctggactacgaggtcaaataccatgagaagggcgccgagggtcccagcagcgtgcggttcctgaagacgtcagaaaaccgggcagagctgcgggggctgaagcggggagccagctacctggtgcaggtacgggcgcgctctgaggccggctacgggcccttcggccaggaacatcacagccagacccaactggatgagagcgagggctggcgggagcagctggccctgattgcgggcacggcagtcgtgggtgtggtcctggtcctggtggtcattgtggtcgcagttctctgcctcaggaagcagagcaatgggagagaagcagaatattcggacaaacacggacagtatctcatcggacatggtactaaggtctacatcgaccccttcacttatgaagaccctaatgaggctgtgagggaatttgcaaaagagatcgatgtctcctacgtcaag

SEQ ID NO: 58 - protein, 414 aa, Homo Sapiens
  SR012E11
MELRVLLCWASLAAALEETLLNTKLETADLKWVTFPQVDGQWEELSGLDEEQHSVRTYEVCDVQRAPGQAHWLRTGWVPRRGAVHVYATLRFTMLECLSLPRAGRSCKETFTVFYYESDADTATALTPAWMENPYIKVDTVAAEHLTRKRPGAEATGKVNVKTLRLGPLSKAGFYLAFQDQGACMALLSLHLFYKKCAQLTVNLTRFPETVPRELVVPVAGSCVVDAVPAPGPSPSLYCREDGQWAEQPVTGCSCAPGFEAAEGNTKCRACAQGTFKPLSGEGSCQPCPANSHSNTIGSAVCQCRVGYFRARTDPRGAPCTTPPSAPRSVVSRLNGSSLHLEWSAPLESGGREDLTYALRCRECRPGGSCAPCGGDLTFDPGPRDLVEPWVVVRGLRPDFTYTFEYLLQCLTSG

SEQ ID NO: 59 - protein, 405 aa, Artificial Sequence
  EGFR.a
MRPSGTAGAALLALLAALCPASRALEEKKVCQGTSNKLTQLGTFEDHFLSLQRMFNNCEVVLGNLEITYVQRNYDLSFLKTIQEVAGYVLIALNTVERIPLENLQIIRGNMYYENSYALAVLSNYDANKTGLKELPMRNLQEILHGAVRFSNNPALCNVESIQWRDIVSSDFLSNMSMDFQNHLGSCQKCDPSCPNGSCWGAGEENCQKLTKIICAQQCSGRCRGKSPSDCCHNQCAAGCTGPRESDCLVCRKFRDEATCKDTCPPLMLYNPTTYQMDVNPEGKYSFGATCVKKCPRNYVVTDHGSCVRACGADSYEMEEDGVRKCKKCEGPCRKVCNGIGIGEFKDSLSINATNIKHFKNCTSISGDLHILPVAFRGDSFTHTPPLDPQELDILKTVKEITGLS

SEQ ID NO: 60 - protein, 680 aa, Homo sapiens
  ERBB2.1.d
MELAALCRWGLLLALLPLPPGAASTQVCTGTDMKLRLPASPETHLDMLRHLYQGCQVVQGNLELTYLPTNASLSFLQDIQEVQGYVLIAHNQVRQVPLQRLRIVRGTQLFEDNYALAVLDNGDPLNNTTPVTGASPGGLRELQLRSLTEILKGGVLIQRNPQLCYQDTILWKDIFHKNNQLALTLIDTNRSRACHPCSPMCKGSRCWGESSEDCQSLTRTVCAGGCARCKGPLPTDCCHEQCAAGCTGPKHSDCLACLHFNHSGICELHCPALVTYNTDTFESMPNPEGRYTFGASCVTACPYNYLSTDVGSCTLVCPLHNQEVTAEDGTQRCEKCSKPCARVCYGLGMEHLREVRAVTSANIQEFAGCKKIFGSLAFLPESFDGDPASNTAPLQPEQLQVFETLEEITGYLYISAWPDSLPDLSVFQNLQVIRGRILHNGAYSLTLQGLGISWLGLRSLRELGSGLALIHHNTHLCFVHTVPWDQLFRNPHQALLHTANRPEDECVGEGLACHQLCARGHCWGPGPTQCVNCSQFLRGQECVEECRVLQGLPREYVNARHCLPCHPECQPQNGSVTCFGPEADQCVACAHYKDPPFCVARCPSGVKPDLSYMPIWKFPDEEGACQPCPINCTHSCVDLDDKGCPAEQRARLAWTPGCTLHCPSLPHWMLGGHCCREGTP

SEQ ID NO: 61 - protein, 633 aa, Homo sapiens
  ERBB2.1.e
MELAALCRWGLLLALLPPGAASTQVCTGTDMKLRLPASPETHLDMLRHLYQGCQVVQGNLELTYLPTNASLSFLQDIQEVQGYVLIAHNQVRQVPLQRLRIVRGTQLFEDNYALAVLDNGDPLNNTTPVTGASPGGLRELQLRSLTEILKGGVLIQRNPQLCYQDTILWKDIFHKNNQLALTLIDTNRSRACHPCSPMCKGSRCWGESSEDCQSLTRTVCAGGCARCKGPLPTDCCHEQCAAGCTGPKHSDCLACLHFNHSGICELHCPALVTYNTDTFESMPNPEGRYTFGASCVTACPYNYLSTDVGSCTLVCPLHNQEVTAEDGTQRCEKCSKPCARVCYGLGMEHLREVRAVTSANIQEFAGCKKIFGSLAFLPESFDGDPASNTAPLQPEQLQVFETLEEITGYLYISAWPDSLPDLSVFQNLQVIRGRILHNGAYSLTLQGLGISWLGLRSLRELGSGLALIHHNTHLCFVHTVPWDQLFRNPHQALLHTANRPEDECVGEGLACHQLCARGHCWGPGPTQCVNCSQFLRGQECVEECRVLQGLPREYVNARHCLPCHPECQPQNGSVTCFGPEADQCVACAHYKDPPFCVARCPSGVKPDLSYMPIWKFPDEEGACQPCPINCTHS

SEQ ID NO: 62 - protein, 575 aa, Homo sapiens
  ERBB2.1.f
MELAALCRWGLLLALLPPGAASTQVCTGTDMKLRLPASPETHLDMLRHLYQGCQVVQGNLELTYLPTNASLSFLQDIQEVQGYVLIAHNQVRQVPLQRLRIVRGTQLFEDNYALAVLDNGDPLNNTTPVTGASPGGLRELQLRSLTEILKGGVLIQRNPQLCYQDTILWKDIFHKNNQLALTLIDTNRSRACHPCSPMCKGSRCWGESSEDCQSLTRTVCAGGCARCKGPLPTDCCHEQCAAGCTGPKHSDCLACLHFNHSGICELHCPALVTYNTDTFESMPNPEGRYTFGASCVTACPYNYLSTDVGSCTLVCPLHNQEVTAEDGTQRCEKCSKPCARVCYGLGMEHLREVRAVTSANIQEFAGCKKIFGSLAFLPESFDGDPASNTAPLQPEQLQVFETLEEITGYLYISAWPDSLPDLSVFQNLQVIRGRILHNGAYSLTLQGLGISWLGLRSLRELGSGLALIHHYTHLCFVHTVPWDQLFRNPHQALLHTANRPEDECGKTGSPVCALPICQHTAVPRGPWQQRSWTCADCPSLCTLLDSAQLWLAWPLGMASLAGSYLPWHPSLPLCF

SEQ ID NO: 63 - protein, 90 aa, Homo sapiens
  ERBB2.a
MELAALCRWGLLLALLPPGAASTQVCTGTDMKLRLPASPETHLDMLRHLYQGCQVVQGNLELTYLPTNASLSFLQVRPVGNPARPCLQLG

SEQ ID NO: 64 - protein, 419 aa, Artificial Sequence
  ERBB2.c BUILD 31
MELAALCRWGLLLALLPPGAASTQVCTGTDMKLRLPASPETHLDMLRHLYQGCQVVQGNLELTYLPTNASLSFLQDIQEVQGYVLIAHNQVRQVPLQRLRIVRGTQLFEDNYALAVLDNGDPLNNTTPVTGASPGGLRELQLRSLTEILKGGVLIQRNPQLCYQDTILWKDIFHKNNQLALTLIDTNRSRACHPCSPMCKGSRCWGESSEDCQSLTRTVCAGGCARCKGPLPTDCCHEQCAAGCTGPKHSDCLACLHFNHSGICELHCPALVTYNTDTFESMPNPEGRYTFGASCVTACPYNYLSTDVGSCTLVCPLHNQEVTAEDGTQRCEKCSKPCARGTHSLPPRPAAVPVPLRMQPGPAHPVLSFLRPSWDLVSAFYSLPLAPLSPTSVPISPVSVGRGPDPDAHVAVDLSRYEG

SEQ ID NO: 65 - protein, 331 aa, Artificial Sequence
  ERBB3.d BUILD 31
MRANDALQVLGLLFSLARGSEVGNSQAVCPGTLNGLSVTGDAENQYQTLYKLYERCEVVMGNLEIVLTGHNADLSFLQWIREVTGYVLVAMNEFSTLPLPNLRVVRGTQVYDGKFAIFVMLNYNTNSSHALRQLRLTQLTEILSGGVYIEKNDKLCHMDTIDWRDIVRDRDAEIVVKDNGRSCPPCHEVCKGRCWGPGSEDCQTLTKTICAPQCNGHCFGPNPNQCCHDECAGGCSGPQDTDCFACRHFNDSGACVPRCPQPLVYNKLTFQLEPNPHTKYQYGGVCVASCPHNFVVDQTSCVRACPPDKMEVDKNGLKMCEPCGGLCPKAF

SEQ ID NO: 66 - DNA, 878 bp, Homo Sapiens
  CDS (9)...(695): SR001E12
gaactgggatgtggagctggaagtgcctcctcttctgggctgtgctggtcacagccacactctgcaccgctaggccgtccccgaccttgcctgaacaagatgctctcccctcctcggaggatgatgatgatgatgatgactcctcttcagaggagaaagaaacagataacaccaaaccaaaccccgtagctccatattggacatccccagaaaagatggaaaagaaattgcatgcagtgccggctgccaagacagtgaagttcaaatgcccttccagtgggaccccaaaccccacactgcgctggttgaaaaatggcaaagaattcaaacctgaccacagaattggaggctacaaggtccgttatgccacctggagcatcataatggactctgtggtgccctctgacaagggcaactacacctgcattgtggagaatgagtacggcagcatcaaccacacataccagctggatgtcgtggagcggtcccctcaccggcccatcctgcaagcagggttgcccgccaacaaaacagtggccctgggtagcaacgtggagttcatgtgtaaggtgtacagtgacccgcagccgcacatccagtggctaaagcacatcgaggtgaatgggagcaagattggcccagacaacctgccttatgtccagatcttgaagccctggaagagaggccggcagtgatgacctcgcccctgtacctggagatcatcatctattgcacaggggccttcctcatctcctgcatggtggggtcggtcatcgtctacaagatgaagagtggtaccaagaagagtgacttccacagccagatggctgtgcacaagctggccaagagcatccctctgcgcagacaggtaacagaaa

SEQ ID NO: 67 - protein, 228 aa, Homo Sapiens
  SR001E12
MWSWKCLLFWAVLVTATLCTARPSPTLPEQDALPSSEDDDDDDDSSSEEKETDNTKPNPVAPYWTSPEKMEKKLHAVPAAKTVKFKCPSSGTPNPTLRWLKNGKEFKPDHRIGGYKVRYATWSIIMDSVVPSDKGNYTCIVENEYGSINHTYQLDVVERSPHRPILQAGLPANKTVALGSNVEFMCKVYSDPQPHIQWLKHIEVNGSKIGPDNLPYVQILKPWKRGRQ

SEQ ID NO: 68 - DNA, 965 bp, Homo Sapiens
  SR022C02
atgtggagctggaagtgcctcctcttctgggctgtgctggtcacagccacactctgcaccgctaggccgtccccgaccttgcctgaacaagatgctctcccctcctcggaggatgatgatgatgatgatgactcctcttcagaggagaaagaaacagataacaccaaaccaaaccgtatgcccgtagctccatattggacatccccagaaaagatggaaaagaaattgcatgcagtgccggctgccaagacagtgaagttcaaatgcccttccagtgggaccccaaaccccacactgcgctggttggaaaatggcaaagaattcaaacctggccacagaattggaggctacaaggtccgttatgccacctggagcatcataatggactctgtggtgccctctgacaagggcaactacacctgcattgtggagaatgagtacggcagcatcaaccacacataccagctggatgtcgtggagcggtcccctcaccggcccatcctgcaagcagggttgcccgccaacaaaacagtggccctgggtagcaacgtggagttcatgtgtaaggtgtacagtgacccgcagccgcacatccagtggctaaagcacatcgaggtgaatgggagcaagattggcccggacaacctgccttatgtccagatcttgaagactgctggagttaataccaccgacaaagagatggaggtgcttcacttaagaaatgtctcctttgaggacgcaggggagtatacgtgcttggcgggtaactctatcggactctcccatcactctgcatggttgaccgttctggaaggtacacactgtaacttctcctctcgatgtcctgccctcgccacgggcacggggggagcatgcatttccaggcttggggagacacagaggcaggagagctggaagaatgggctcctgcctgcctggtgccacatcctgccccagctttgagg

SEQ ID NO: 69 - protein, 320 aa, Homo Sapiens [sequence omitted]

SEQ ID NO: 70 - DNA, 801 bp, Homo Sapiens
  SR022C10
atggtcagctggggtcgtttcatctgcctggtcgtggtcaccatggcaaccttgtccctggcccggccctccttcagtttagttgaggataccacattagagccagaagagccaccaaccaaataccaaatctctcaaccagaagtgtacgtggctgcgccaggggagtcgctagaggtgcgctgcctgttgaaagatgccgccgtgatcagttggactaaggatggggtgcacttggggcccaacaataggacagtgcttattggggagtacttgcagataaagggcgccacgcctagagactccggcctctatgcttgtactgccagtaggactgtagacagtgaaacttggtacttcatggtgaatgtcacagatgccatctcatccggagatgatgaggatgacaccgatggtgcggaagattttgtcagtgagaacagtaacaacaagagagcaccatactggaccaacacagaaaagatggaaaagcggctccatgctgtgcctgcggccaacactgtcaagtttcgctgcccagccggggggaacccaatgccaaccatgcggtggctgaaaaacgggaaggagtttaagcaggagcatcgcattggaggctacaaggtacgaaaccagcactggagcctcattatggaaagtgtggtcccatctgacaagggaaattatacctgtgtggtggagaatgaatacgggtccatcaatcacacgtaccacctggatgttgtgggtgagtctgcctctcctcgtgtggcggctgcataccagcccattcttgcttga

SEQ ID NO: 71 - protein, 266 aa, Homo Sapiens [sequence omitted]

SEQ ID NO: 72 - DNA, 953 bp, Homo Sapiens
  SR022C11
atggtcagctggggtcgtttcatctgcctggtcgtggtcaccatggcaaccttgtccctggcccggccctccttcagtttagttgaggataccacattagagccagaagagccaccaaccaaataccaaatctctcaaccagaagtgtacgtggctgcgccaggggagtcgctagaggtgcgctgcctgttgaaagatgccgccgtgatcagttggactaaggatggggtgcacttggggcccaacaataggacagtgcttattggggagtacttgcagataaagggcgccacgcctagagactccggcctctatgcttgtactgccagtaggactgtagacagtgaaacttggtacttcatggtgaatgtcacagatgccatctcatccggagatgatgaggatgacaccgatggtgcggaagattttgtcagtgagaacagtaacaacaagagagcaccatactggaccaacacagaaaagatggaaaagcggctccatgctgtgcctgcggccaacactgtcaagtttcgctgcccagccggggggaacccaatgccaaccatgcggtggctgaaaaacgggaaggagtttaagcaggagcatcgcattggaggctacaaggtacgaaaccagcactggagcctcattatggaaagtgtggtcccatctgacaagggaaattatacctgtgtggtggagaatgaatacgggtccatcaatcacacgtaccacctggatgttgtggagcgatcgcctcaccggcccatcctccaagccggactgccggcaaatgcctccacagtggtcggaggagacgtagagtttgtctgcaaggtttacagtgatgcccagccccacatccagtggatcaagcacgtggaaaagaacggcagtaaatacgggcccgacgggctgccctacctcaaggttctcaaggtgaggactttctg

SEQ ID NO: 73 - protein, 317 aa, Homo Sapiens
  SR022C11
MVSWGRFICLVVVTMATLSLARPSFSLVEDTTLEPEEPPTKYQISQPEVYVAAPGESLEVRCLLKDAAVISWTKDGVHLGPNNRTVLIGEYLQIKGATPRDSGLYACTASRTVDSETWYFMVNVTDAISSGDDEDDTDGAEDFVSENSNNKRAPYWTNTEKMEKRLHAVPAANTVKFRCPAGGNPMPTMRWLKNGKEFKQEHRIGGYKVRNQHWSLIMESVVPSDKGNYTCVVENEYGSINHTYHLDVVERSPHRPILQAGLPANASTVVGGDVEFVCKVYSDAQPHIQWIKHVEKNGSKYGPDGLPYLKVLKVRTF

SEQ ID NO: 74 - DNA, 844 bp, Homo Sapiens
  SR022D04
atggtcagctggggtcgtttcatctgcctggtcgtggtcaccatggcaaccttgtccctggcccggccctccttcagtttagttgaggatatcacattagagccagaaggagcaccatactggaccaacacagaaaagatggaaaagcggctccatgctgtgcctgcggccaacactgtcaagtttcgctgcccagccggggggaacccaatgccaaccatgcggtggctgaaaaacgggaaggagtttaagcaggagcatcgcattggaggctacaaggtacgaaaccagcactggagcctcattatggaaagtgtggtcccatctgacaagggaaattatacctgtgtggtggagaatgaatacgggtccatcaatcacacgtaccacctggatgttgtggagcgatcgcctcaccggcccatcctccaagccggactgccggcaaatgcctccacagtggtcggaggagacgtagagtttgtctgcaaggtttacagtgatgcccagccccacatccagtggatcaagcacgtggaaaagaacggcagtaaatacgggcccgacgggctgccctacctcaaggttctcaaggccgccggtgttaacaccacggacaaagagattgaggttctctatattcggaatgtaacttttgaggacgctggggaatatacgtgcttggcgggtaattctattgggatatcctttcactccgcatggttgacagttctgccaggtatatactgttctttctctctgggtttttttcctttttcttggttgactgctataaaattaacacagcttctgttatcagaaatggccccttttatccttgcat

SEQ ID NO: 75 - protein, 281 aa, Homo Sapiens [sequence omitted]

SEQ ID NO: 76 - DNA, 1191 bp, Homo Sapiens
  SR022D06
atggtcagctggggtcgtttcatctgcctggtcgtggtcaccatggcaaccttgtccctggcccggccctccttcagtttagttgaggataccacattagagccagaagagccaccaaccaaataccaaatctctcaaccagaagtgtacgtggctgcgccaggggagtcgctagaggtgcgctgcctgttgaaagatgccgccgtgatcagttggactaaggatggggtgcacttggggcccaacaataggacagtgcttattggggagtacttgcagataaagggcgccacgcctagagactccggcctctatgcttgtactgccagtaggactgtagacagtgaaacttggtacttcatggtgaatgtcacagatgccatctcatccggagatgatgaggatgacaccgatggtgcggaagattttgtcagtgagaacagtaacaacaagagagcaccatactggaccaacacagaaaagacggaaaagcggctccatgctgtgcctgcggccaacactgtcaagtttcgctgcccagccggggggaacccaatgccaaccatgcggtggctgaaaaacgggaaggagtttaagcaggagcatcgcattggaggctacaaggtacgaaaccagcactggagcctcattatggaaagtgtggtcccatctgacaagggaaattatacctgtgtggtggagaatgaatacgggtccatcaatcacacgtaccacctggatgttgtggagcgatcgcctcaccggcccatcctccaagccggactgccggcaaatgcctccacagtggtcggaggagacgtagagtttgtctgcaaggtttacagtgatgcccagccccacatccagtggatcaagcacgtggaaaagaacggcagtaaatacgggcccgacgggctgccctacctcaaggttctcaaggccgccggtgttaacaccacggacaaagagattgaggttctctatattcggaatgtaacttttgaggacgctggggaatatacgtgcttggcgggtaattctattgggatatcctttcactctgcatggttgacagttctgccaggtatatactgttctttctctctgggtttttttcccttttcttggttgactgctataaaattaacacagcttctgttatcagaaatggccccttttatccttgcataa

SEQ ID NO: 77 - protein, 396 aa, Homo Sapiens [sequence omitted]

SEQ ID NO: 78 - protein, 366 aa, Artificial Sequence
  FGFR2.b BUILD 31
MVSWGRFICLVVVTMATLSLARPSFSLVEDTTLEPEEPPTKYQISQPEVYVAAPGESLEVRCLLKDAAVISWTKDGVHLGPNNRTVLIGEYLQIKGATPRDSGLYACTASRTVDSETWYFMVNVTDAISSGDDEDDTDGAEDFVSENSNNKRAPYWTNTEKMEKRLHAVPAANTVKFRCPAGGNPMPTMRWLKNGKEFKQEHRIGGYKVRNQHWSLIMESVVPSDKGNYTCVVENEYGSINHTYHLDVVERSPHRPILQAGLPANASTVVGGDVEFVCKVYSDAQPHIQWIKHVEKNGSKYGPDGLPYLKVLKHSGINSSNAEVLALFNVTEADAGEYICKVSNYIGQANQSAWLTVLPKQQGRRC

SEQ ID NO: 79 - DNA, 713 bp, Homo sapiens
  SR002A11
tgggtccctgagagctgtgagaaggagatgcggctgctgctggccctgttgggggtcctgctgagtgtgcctgggcctccagtcttgtccctggaggcctctgaggaagtggagcttgcaagcattcatctatcactgtgtctgcgagagaggactggccttgcagggcgcagggccctaagctgggctgcagagctggtgagccctgcctggctcccagcctggagcagcaagagcaggagctgacagtagcccttgggcagcctgtgcgtctgtgctgtgggcgggctgagcgtggtggccactggtacaaggagggcagtcgcctggcacctgctggccgtgtacggggctggaggggccgcctagagattgccagcttcctacctgaggatgctggccgctacctctgcctggcacgaggctccatgatcgtcctgcagaatctcaccttgattacaggtgactccttgacctccagcaacgatgatgaggaccccaagtcccatagggacccctcgaataggcacagttacccccagcaagcaccctactggacacacccccagcgcatggagaagaaactgcatgcagtacctgcggggaacaccgtcaagttccgctgtccagctgcaggcaaccccacgcccaccatccgctggcttaaggatggacaggcctttcatggggagaaccgcattggaggcattcgg

SEQ ID NO: 80 - protein, 72 aa, Homo sapiens
  SR002A11
MRLLLALLGVLLSVPGPPVLSLEASEEVELASIHLSLCLRERTGLAGRRALSWAAELVSPAWLPAWSSKSRS

SEQ ID NO: 81 - DNA, 1775 bp, Homo Sapiens
  CDS (26)...(1366): SR002A10
ggtccctgagagctgtgagaaggagatgcggctgctgctggccctgttgggggtcctgctgagtgtgcctgggcctccagtcttgtccctggaggcctctgaggaagtggagcttgagccctgcctggctcccagcctggagcagcaagagcaggagctgacagtagcccttgggcagcctgtgcgtctgtgctgtgggcgggctgagcgtggtggccactggtacaaggagggcagtcgcctggcacctgctggccgtgtacggggctggaggggccgcctagagattgccagcttcctacctgaggatgctggccgctacctctgcctggcacgaggctccatgatcgtcctgcagaatctcaccttgattacaggtgactccttgacctccagcaacgatgatgaggaccccaagtcccatagggacccctcgaataggcacagttacccccagcaagcaccctactggacacacccccagcgcatggagaagaaactgcatgcagtacctgcggggaacaccgtcaagttccgctgtccagctgcaggcaaccccacgcccaccatccgctggcttaaggatggacaggcctttcatggggagaaccgcattggaggcattcggctgcgccatcagcactggagtctcgtgatggagagcgtggtgccctcggaccgcggcacatacacctgcctggtagagaacgctgtgggcagcatccgctataactacctgctagatgtgctggagcggtccccgcaccggcccatcctgcaggccgggctcccggccaacaccacagccgtggtgggcagcgacgtggagctgctgtgcaaggtgtacagcgatgcccagccccacatccagtggctgaagcacatcgtcatcaacggcagcagcttcggagccgacggtttcccctatgtgcaagtcctaaagactgcagacatcaatagctcagaggtggaggtcctgtacctgcggaacgtgtcagccgaggacgcaggcgagtacacctgcctcgcaggcaattccatcggcctctcctaccagtctgcctggctcacggtgctgccaggtgagcacctgaagggccaggagatgctgcgagatgcccctctgggccagcagtgggggctgtggcctgttgggtggtcagtctctgttggcctgtggggtctggcctggggggcagtgtgtggatttgtgggtttgagctgtatgacagcccctctgtgcctctccacacgtggccgtccatgtgaccgtctgctgaggtgtgggtgcctgggactgggcataactacagcttcctccgtgtgtgtccccacatatgttgggagctgggagggactgagttagggtgcacggggcggccagtctcaccactgaccagtttgtctgtctgtgtgtgtccatgtgcgagggcagaggaggaccccacatggaccgcagcagcgcccgaggccaggtatacggacatcatcctgtacgcgtcgggctccctggccttggctgtgctcctgctgctggccgggctgtatcgagggcaggcgctccacggccggcacccccgcccgcccgccactgtgcagaagctctcccgcttccctctggcccgacagttctccctggagtcaggctcttccggcaagtcaagctcatccctggtacgaggcgtgcgtctctcctccagcggccccgccttgctcgccggcctcgtgagtctagatctacctctcgacccactatgggagttcccccgggacag

SEQ ID NO: 82 - protein, 446 aa, Homo Sapiens
  SR002A10
MRLLLALLGVLLSVPGPPVLSLEASEEVELEPCLAPSLEQQEQELTVALGQPVRLCCGRAERGGHWYKEGSRLAPAGRVRGWRGRLEIASFLPEDAGRYLCLARGSMIVLQNLTLITGDSLTSSNDDEDPKSHRDPSNRHSYPQQAPYWTHPQRMEKKLHAVPAGNTVKFRCPAAGNPTPTIRWLKDGQAFHGENRIGGIRLRHQHWSLVMESVVPSDRGTYTCLVENAVGSIRYNYLLDVLERSPHRPILQAGLPANTTAVVGSDVELLCKVYSDAQPHIQWLKHIVINGSSFGADGFPYVQVLKTADINSSEVEVLYLRNVSAEDAGEYTCLAGNSIGLSYQSAWLTVLPGEHLKGQEMLRDAPLGQQWGLWPVGWSVSVGLWGLAWGAVCGFVGLSCMTAPLCLSTRGRPCDRLLRCGCLGLGITTASSVCVPTYVGSWEGLS

SEQ ID NO: 83 - protein, 209 aa, Homo sapiens
  FGFR4.d BUILD 31
MMRTPSPIGTPRIGTVTPSKVSRSPRTCVPAAAHLITEKRRPVWEHTVILGAFPCPPAPYWTHPQRMEKKLHAVPAGNTVKFRCPAAGNPTPTIRWLKDGQAFHGENRIGGIRLRHQHWSLVMESVVPSDRGTYTCLVENAVGSIRYNYLLDVLERSPHRPILQAGLPANTTAVVGSDVELLCKVYSDAQPHIQWLKHIVINGSSFGAD

SEQ ID NO: 84 - DNA, 1240 bp, Homo Sapiens
  SR020C10
atgaaggcccccgctgtgcttgcacctggcatcctcgtgctcctgtttaccttggtgcagaggagcaatggggagtgtaaagaggcactagcaaagtccgagatgaatgtgaatatgaagtatcagcttcccaacttcaccgcggaaacacccatccagaatgtcattctacatgagcatcacattttccttggtgccactaactacatttatgttttaaatgaggaagaccttcagaaggttgctgagtacaagactgggcctgtgctggaacacccagattgtttcccatgtcaggactgcagcagcaaagccaatttatcaggaggtgtttggaaagataacatcaacatggctctagttgtcgacacctactatgatgatcaactcattagctgtggcagcgtcaacagagggacctgccagcgacatgtctttccccacaatcatactgctgatatacagtcggaggttcactgcatattctccccacagatagaagagcccagccagtgtcctgactgtgtggtgagcgccctgggagccaaagtcctttcatctgtaaaggaccggttcatcaacttctttgtaggcaataccataaattcttcttatttcccagatcatccattgcattcgatatcagtgagaaggctaaaggaaacgaaagatggttttatgtttttgacggaccagtcctacattgatgttttacctgagttcagagattcttaccccattaagtatgtccatgcctttgaaagcaacaattttatttacttcttgacggtccaaagggaaactctagatgctcagacttttcacacaagaataatcaggttctgttccataaactctggattgcattcctacatggaaatgcctctggagtgtattctcacagaaaagagaaaaaagagatccacaaagaaggaagtgttaaatatacttcaggctgcgtatgtcagcaagcctggggcccagcttgctaggcaaataggagccagcctgaatgatgacattcttttcggggtgttcgcacaaagcaagccagattctgccgaaccaatggatcgatctgccatgtgtgcattccctatcaaatatgtcaacgacttcttcaacaagatcgtcaacaaaaacaatgtgagatgtctccagcatttttacggacccaatcatgagcactgctttaatagggtaagtcacatcagttccccacttataaactgtgaggtat

SEQ ID NO: 85 - protein, 413 aa, Homo Sapiens [sequence omitted]

SEQ ID NO: 86 - DNA, 1405 bp, Homo Sapiens
  SR020C12
atgaaggcccccgctgtgcttgcacctggcatcctcgtgctcctgtttaccttggtgcagaggagcaatggggagtgtaaagaggcactagcaaagtccgagatgaatgtgaatatgaagtatcagcttcccaacttcaccgcggaaacacccatccagaatgtcattctacatgagcatcacattttccttggtgccactaactacatttatgttttaaatgaggaagaccttcagaaggttgctgagtacaagactgggcctgtgctggaacacccagattgtttcccatgtcaggactgcagcagcaaagccaatttatcaggaggtgtttggaaaaataacatcaacatggctctagttgtcgacacctactatgatgatcaactcattagctgtggcagcgtcaacagagggacctgccagcgacatgtctttccccacaatcatactgctgacatacagtcggaggttcactgcatattctccccacagatagaagagcccagccagtgtcctgactgtgtggtgagcgccctgggagccaaagtcctttcatctgtaaaggaccggttcatcaacttctttgtaggcaataccataaattcttcttatttcccagatcatccattgcattcgatatcagtgagaaggctaaaggaaacgaaagatggttttatgtttttgacggaccagtcctacattgatgttttacctgagttcagagattcttaccccattaagtatgtccatgcctttgaaagcaacaattttatttacttcttgacggtccaaagggaaactctagatgctcagacttttcacacaagaataatcaggttctgttccataaactctggattgcattcctacatggaaatgcctctggagtgtattctcacagaaaagagaaaaaagagatccacaaagaaggaagtgtttaatatacttcaggctgcgtatgtcagcaagcctggggcccagcttgctagacaaataggagccagcctgaatgatgacattcttttcggggtgttcgcacaaagcaagccagattctgccgaaccaatggatcgatctgccatgtgtgcattccctatcaaatatgtcaacgacttcttcaacaagatcgtcaacaaaaacaatgtgagatgtctccagcatttttacggacccaatcatgagcactgctttaataggacacttctgagaaattcatcaggctgtgaagcgcgccgtgatgaatatcgaacagagtttaccacagctttgcagcgcgttgacttattcatgggtcaattcagcgaagtcctcttaacatctatatccaccttcattaaaggagacctcaccatagctaatcttgggacatcagagggtcgcttcatgcaggtaagtgctttct

SEQ ID NO: 87 - protein, 468 aa, Homo Sapiens [sequence omitted]

SEQ ID NO: 88 - DNA, 1557 bp, Homo Sapiens
  SR020D04
atgaaggcccccgctgtgcttgcacctggcatcctcgtgctcctgtttaccttggtgcagaggagcaatggggagtgtaaagaggcactagcaaagtccgagatgaatgtgaatatgaagtatcagcttcccaacttcaccgcggaaacacccatccagaatgtcattctacatgagcatcacattttccttggtgccactaactacatttatgttttaaatgaggaagaccttcagaaggttgctgagtacaagactgggcctgtgctggaacacccagattgtttcccatgtcaggactgcagcagcaaagccaatttatcaggaggtgtttggaaagataacattaacatggctctagttgtcgacacctactatgatgatcaactcattagctgtggcagcgtcaacagagggacctgccagcgacatgtctttccccacaatcatactgctgacatacagtcggaggttcactgcatattctccccacagatagaagagcccagccagtgtcctgactgtgtggtgagcgccctgggagccaaagtcctttcatctgtaaaggaccggttcatcaacttctttgtaggcaataccataaattcttcttatttcccagatcatccattgcattcgatatcagtgagaaggctaaaggaaacgaaagatggttttatgtttttgacggaccagtcctacattgatgttttacctgagttcagagattcttaccccattaagtatgtccatgcctttgaaagcaacaattttatttacttcttgacggtccaaagggaaactctagatgctcagacttttcacacaagaataatcaggttctgttccataaactctggattgcattcctacatggaaatgcctctggagtgtattctcacagaaaagagaaaaaagagatccacaaagaaggaagtgtttaatatacttcaggctgcgtatgtcagcaagcctggggcccagcttgctagacaaataggagccagcctgaatgatgtcattcttttcggggtgttcgcacaaagcaagccagattctgccgaaccaatggatcgatctgccatgtgtgcattccctatcaaatatgtcaacgacttcttcaacaagatcgtcaacaaaaacaatgtgagatgtctccagcatttttacggacccaatcatgagcactgctttaataggacacttctgagaaattcatcaggctgtgaagcgcgccgtgatgaatatcgaacagagtttaccacagctttgcagcgcgttgacttattcatgggtcaattcagcgaagtcctcttaacatctatatccaccttcattaaaggagacctcaccatagctaatcttgggacatcagagggtcgcttcatgcaggttgtggtttctcgatcaggaccatcaacccctcatgtgaattttctcctggactcccatccagtgtctccagaagtgattgtggagcatacattaaaccaaaatgactacacactggttatcactgggaaggaggtaagctgttcccacagggaatttccatga

SEQ ID NO: 89 - protein, 518 aa, Homo Sapiens [sequence omitted]

SEQ ID NO: 90 - DNA, 1789 bp, Homo Sapiens
  SR020D07
atgaaggcccccgctgtgcttgcacctggcatcctcgtgctcctgtttaccttggtgcagaggagcaatggggagtgtaaagaggcactagcaaagtccgagatgaatgtgaatatgaagtatcagcttcccaacttcaccgcggaaacacccatccagaatgtcattctacatgagcatcacattttccttggtgccactaactacatttatgttttaaatgaggaagaccttcagaaggttgctgagtacaagactgggcctgtgctggaacacccagattgtttcccatgtcaggactgcagcagcaaagccaatttatcaggaggtgtttggaaagataacatcaacatggctctagttgtcgacacctactatgatgatcaactcattagctgtggcagcgtcaacagagggacctgccagcgacatgtctttccccacaatcatactgctgacatacagtcggaggttcactgcatattctccccacagatagaagagcccagccagtgtcctgactgtgtggtgagcgccctgggagccaaagtcctttcatctgtaaaggaccggttcatcaacttctttgtaggcaataccataaattcttcttatttcccagatcatccattgcattcgatatcagtgagaaggctaaaggaaacgaaagatggttttatgtttttgacggaccagtcctacattgatgttttacctgagttcagagattcttaccccattaagtatgtccatgcctttgaaagcaacaattttatttacttcttgacggtccaaagggaaactctagatgctcagacttttcacacaagaataatcaggttctgttccataaactctggattgcattcctacatggaaatgcctctggagtgtattctcacagaaaagagaaaaaagagatccacaaagaaggaagtgtttaatatacttcaggctgcgtatgtcagcaagcctggggcccagcttgctagacaaataggagccagcccgaatgatgacattcttttcggggtgttcgcacaaagcaagccagattctgccgaaccaatggatcgatctgccatgtgtgcattccctatcaaatatgtcaacgacttcttcaacaagatcgtcaacaaaaacaatgtgagatgtctccagcatttttacggacccaatcatgagcactgctttaataggacacttctgagaaattcatcaggctgtgaagcgcgccgtgatgaatatcgaacagagtttaccacagctttgcagcgcgttgacttattcatgggtcaattcagcgaagtcctcttaacatctatatccaccttcattaaaggagacctcaccatagctaatcttgggacatcagagggtcgcttcatgcaggttgtggtttctcgatcaggaccatcaacccctcatgtgaattttctcctggactcccatccagtgtctccagaagtgattgtggagcatacattaaaccaaaatggctacacactggttatcactgggaagaagatcacgaagatcccattgaatggcttgggctgcagacatttccagtcctgcagtcaatgcctctctgccccaccctttgttcagtgtggctggtgccacgacaaatgtgtgcgatcggaggaatgcctgagcgggacatggactcaacagatctgtctgcctgcaatctacaaggtaggaatctctaacagctggcatacatgtttttgtttggtgttttttttttttttttggtttggtttggtttgttttttgttttttt

SEQ ID NO: 91 - protein, 596 aa, Homo Sapiens [sequence omitted]

SEQ ID NO: 92 - DNA, 1936 bp, Homo Sapiens
  SR020D11
atgaaggcccccgctgtgcttgcacctggcatcctcgtgctcctgtttaccttggtgcagaggagcaatggggagtgtaaagaggcactagcaaagtccgagatgaatgtgaatatgaagtatcggcttcccaacttcaccgcggaaacacccatccagaatgtcattctacatgagcatcacattttccttggtgccactaactacatttatgttttaaatgaggaagaccttcagaaggttgctgagtacaagactgggcctgtgctggaacacccagattgtttcccatgtcaggactgcagcagcaaagccaatttatcaggaggtgtttggagagataacatcaacatggctctagttgtcgacacctactatgatgatcaactcattagctgtggcagcgtcaacagagggacctgccagcgacatgcctttccccacaatcatactgctgacatacagtcggaggttcactgcatattctccccacagatagaagatcccagccagtgtcctgactgtgtggtgagcgccctgggagccaaagtcctttcatctgtaaaggaccggttcatcaacttctttgtaggcaataccataaattcttcttatttcccagatcatccattgcattcgatatcattgagaaggctaaaggaaacgaaagatggttttatgtttttgacggaccagtcctacattgatgttttacctgagttcagagattcttaccccattaagtatgtccatgcctttgaaagcaacaattttatttacttcttgacggtccaaagggaaactctagatgctcagacttttcacgcaagaataatcaggttctgttccataaactctggattgcattcctacatggaaatgcctctggagtgtattctcacagagaagagaaaaaagagatccacaaagaaggaagtgtttaatatacttcaggctgcgtatgtcagcaagcctggggcccagcttgctagacaaataggagccagcctgaatgatgacattcttttcggggtgttcgcacaaagcaagccagattctgccgaaccaatggatcgatctgccatgtgtgcattccctatcaaatatgtcaacgacttcttcaacaagatcgtcaacaaaaacaatgtgagatgtctccagcatttttacggacccaatcatgagcactgctttaatagggcagaaaatgtgctagattggaggtgaagaccctggagccagagagcctaggcttagtcctagccctgcactgaagacacttctgagaaattcatcaggctgtgaagcgcgccgtgatgaatatcgaacagagtttaccacagctttgcagcgcgttgacttattcatgggtcaattcagcgaagtcctcttaacatctatatccaccttcattaaaggagacctcaccatagctaatcttgggacatcagagggtcgcttcatgcaggttgtggtttctcgatcaggaccatcaacccctcatgtgaattttctcctggactcccatccagtgtctccagaagtgattgtggagcatacattaaaccaaaatggctacacactggttatcactgggaagaagatcacgaagatcccattgaatggcttgggctgcagacatttccagtcctgcagtcaatgcctctctgccccaccctttgttcagtgtggctggtgccacaacaaatgtgtgcgatcggaggaatgcctgagcgggacatggactcaacagatctgtctgcctgcaatctacaaggtaggaatctctaacagctggcatacatgtttttgtttggtgttttttttttttttttggtttggtttggtttgttttttgtttttttagatacaaatcccactaatgaaaaaaatttaaaaatcaatttactcatttagctgtgagtcatcagctaaa

SEQ ID NO: 93 - protein, 408 aa, Homo Sapiens [sequence omitted]

SEQ ID NO: 94 - DNA, 1888 bp, Homo Sapiens
  SR020E11
atgaaggcccccgctgtgcttgcacctggcatcctcgtgctcctgtttaccttggtgcagaggagcaatggggagtgtaaagaggcactagcaaagtccgagatgaatgtgaatatgaagtatcagcttcccaacttcaccgcggaaacacccatccagaatgtcattctacatgagcatcacattttccttggtgccactaactacatttatgttttaaatgaggaagaccttcagaaggttgctgagtacaagactgggcctgtgctggaacacccagattgtttcccatgtcaggactgcagcagcaaagccaatttatcaggaggtgtttggaaagataacatcaacatggctctagttgtcgacacctactatgatgatcaactcattagctgtggcagcgtcaacagagggacctgccagcgacatgtctttccccacaatcatactgctgacatacagtcggaggctcactgcatattctccccacagatagaagagcccagtcagtgtcctgactgtgtggtgagcgccctgggagccaaagtcctttcatctgtaaaggaccggttcatcaacttctttgtaggcaataccataaattcttcttatttcccagatcatccattgcattcgatatcagtgagaaggctaaaggaaacgaaagatggttttatgtttttgacggaccagtcctacattgatgttttacctgagttcagagattcttaccccattaagtatgtccatgcctttgaaagcaacaattttatttacttcttgacggtccaaagggaaactctagatgctcagacttttcacacaagaataatcaggttctgttccataaactctggattgcattcctacatggaaatgcctctggagtgtattctcacagaaaagagaaaaaagagatccacaaagaaggaagtgtttaatatacttcaggctgcgtatgtcagcaagcctggggcccagcttgctagacaaataggagccagcctgaatgatgacattcttttcggggtgttcgcacaaagcaagccagattctgccgaaccaatggatcgatctgccatgtgtgcattccctatcaaatatgtcaacgacttcttcaacaagatcgtcaacaaaaacaatgtgagatgtctccagcatttttacggacccaatcatgagcactgctttaataggacacttctgagaaattcatcaggctgtgaagcgcgccgtgatgaatatcgaacagagtttaccacagctttgcagcgcgttgacttattcatgggtcaattcagcgaagtcctcttaacatctatatccaccttcattaaaggagacctcaccatagctaatcttgggacatcagagggtcgcttcatgcaggttgtggtttctcgatcaggaccatcaacccctcatgtgaattttctcctggactcccatccagtgtctccagaagtgattgtggagcatacattaaaccaaaatggctacacactggttatcactgggaagaagatcacgaagatcccattgaatggcttgggctgcagacatttccagtcctgcagtcaatgcctctctgccccaccctttgttcagtgtggctggtgccacgacaaatgtgtgcgatcggaggaatgcctgagcgggacatggactcaacagatctgtctgcctgcaatctacaaggttttcccaaatagtgcaccccttgaaggagggacaaggctgaccatatgtggctgggactttggatttcggaggaataataaatttgatttaaagaaaactagagttctccttggaaatgagagctgcaccttgactttaagtgagagcacgatgaatacgtaaggatcttaaaatgctttgctgg

SEQ ID NO: 95 - protein, 621 aa, Homo Sapiens [sequence omitted]

SEQ ID NO: 96 - DNA, 1995 bp, Homo Sapiens
  SR020F08
atgaaggcccccgctgtgcttgcacctggcatcctcgtgctcctgtttaccttggtgcagaggagcaatggggagtgtaaagaggcactagcaaagtccgagatgaatgtgaatatgaagtatcagcttcccaacttcaccgcggaaacacccatccagaatgtcattctacatgagcatcacattttccttggtgccactaactacatttatgttttaaatgaggaagaccttcagaaggttgctgagtacaagactgggcctgtgctggaacacccagattgtttcccatgtcaggactgcagcagcaaagccaatttatcaggaggtgtttggaaagataacatcaacatggctctagttgtcgacacctactatgatgatcaactcattagctgtggcagcgtcaacagagggacctgccagcgacatgtctttccccacaatcatactgctgacatacagtcggaggttcactgcatattctccccacagatagaagagcccagccagtgtcctgactgtgtggtgagcgccctgggagccaaagtcctttcatctgtaaaggaccggttcatcaacttctttgtaggcaataccataaattcttcttatttcccagatcatccattgcattcgatatcagtgagaaggctaaaggaaacgaaagatggttttatgtttttgacggaccagtcctacattgatgttttacctgagttcagagattcttaccccattaagtatgtccatgcctttgaaagcaacaattttatttacttcttgacggtccaaagggaaactctagatgctcagacttttcacacaagaataatcaggttctgttccataaactctggattgcattcctacatggaaatgcctctggagtgtattctcacagaaaagagaaaaaagagatccacaaagaaggaagtgtttaatatacttcaggctgcgtatgtcagcaagcctggggcccagcttgctagacaaataggagccagcctgaatgatgacattcttttcggggtgttcgcacaaagcaagccagattctgccgaaccaatggatcgatctgccatgtgtgcattccctatcaaatatgtcaacgacttcttcaacaagatcgtcaacaaaaacaatgtgagatgtctccagcatttttacggacccaatcatgagcactgctttaataggacacttctgagaaattcatcaggctgtgaagcgcgccgtgatgaatatcgaacagagtttaccacagctttgcagcgcgttgacttattcatgggtcaattcagcgaagtcctcttaacatctatatccaccttcattaaaggagacctcaccatagctaatcttgggacatcagagggtcgcttcatgcaggttgtggtttctcgatcaggaccatcaacccctcatgtgaattttctcatggactcccatccagtgtctccagaagtgattgtggagcatacattaaaccaaaatggctacacactggttatcactgggaagaagatcacgaagatcccattgaatggcttgggctgcagacatttccagtcctgcagtcaatgcctctctgccccaccctttgttcagtgtggctggtgccacgacaaatgtgtgcgatcggaggaatgcctgagcgggacatggactcaacagatctgtctgcctgcaatctacaaggttttcccaaatagtgcaccccttgaaggagggacaaggctgaccatatgtggctgggactttggatttcggaggaataataaatttgatttaaagaaaactagagttctccttggaaatgagagctgcaccttgactttaagtgagagcacgatgaatacattgaaatgcacagttggtcctgccatgaataagcatttcaatatgtccataattatttcaaatggccacgggacaacacaatacagtacattctcctatgtggtaaggaagattctatcctatcatgtttga

SEQ ID NO: 97 - protein, 664 aa, Homo Sapiens [sequence omitted]

SEQ ID NO: 98 - DNA, 2170 bp, Homo Sapiens
  SR020F11
atgaaggcccccgctgtgcttgcacctggcatcctcgtgctcctgtttaccctggtgcagaggagcaatggggagtgtaaagaggcactagcaaagtccgagatgaatgtgaatatgaagtatcagcttcccaacttcaccgcggaaacacccatccagaatgtcattctacatgagcatcacattttccttggtgccactaactacatttatgttttaaatgaggaagaccttcagaaggttgctgagtacaagactgggcctgtgctggaacacccagattgtttcccatgtcaggactgcagcagcaaagccaatttatcaggaggtgtttggaaagataacatcaacatggctctagttgtcgacacctactatgatgatcaactcattagctgtggcagcgtcaacagagggacctgccagcgacatgtctttccccacaatcatcctgctgacatacagtcggaggttcactgcatattctccccacagatagaagagcccagccagtgtcctgactgtgtggtgagcgccctgggagccaaagtcctttcatctgtaaaggaccggttcatcaacttctttgtaggcaataccataaattcttcttatttcccagatcatccattgcattcgatatcagtgagaaggctaaaggaaacgaaagatggttttatgtttttgacggaccagtcctacattgatgttttacctgagttcagagattcttaccccattaagtatgtccatgcctttgaaagcaacaattttatttacttcttgacggtccaaagggaaactctagatgctcagacttttcacacaagaataatcaggttctgttccataaactctggattgcattcctacatggaaatgcctctggagtgtattctcacagaaaagagaaaaaagagatccacaaagaaggaagtgtttaatatacttcaggctgcgtatgttagcaagcctggggcccagcttgctagacaaataggagccagcctgaatgatgacattcttttcggggtgttcgcacaaagcaagccagattctgccgaaccaatggatcgatctgccatgtgtgcattccctatcaaatatgtcaacgacttcttcaacaagatcgtcaacaaaaacaatgtgagatgtctccagcatttttacggacccaatcatgagcactgctttaataggacacttctgagaaattcatcaggctgtgaagcgcgccgtgatgaatatcgaacagagtttaccacagctttgcagcgcgttgacttattcatgggtcaattcagcgaagtcctcttaacatctatatccaccttcattaaaggagacctcaccatagctaatcttgggacatcagagggtcgcttcatgcaggttgtggtttctcgatcaggaccatcaacccctcatgtgaattttctcctggactcccatccagtgtctccagaagtgattgtggagcatacattaaaccaaaatggccacacactggttatcactgggaagaagatcacgaagatcccattgaatggcttgggctgcagacatttccagtcctgcagtcaatgcctctctgccccaccctttgttcagtgtggctggtgccacgacaaatgtgtgcgatcggaggaatgcctgagcgggacatggactcaacagatctgtctgcctgcaatctacaaggttttcccaaatagtgcaccccttgaaggagggacaaggctgaccatatgtggctgggactttggatttcggaggaataataaatttgatttaaagaaaactagagttctccttggaaatgagagctgcaccttgactttaagtgagagcacgatgaatacattgaaatgcacagttggtcctgccatgaataagcatttcaatatgtccataattatttcaaatggccacgggacaacacaatacagtacattctcctatgtggatcctgtaataacaagtatttcgccgaaatacggtcctatggctggtggcactttacttactttaactggaaattacctaaacagtgggaattctagacacatttcaattggtggaaaaacatgtactttaaaaaggtgttgtaaatttattttttgttgcatctgtcaatttgaattaatatctgtaccttaaaaattaagca

SEQ ID NO: 99 - protein, 719 aa, Homo Sapiens [sequence omitted]

SEQ ID NO: 100 - DNA, 2194 bp, Homo Sapiens
  SR020F12
atgaaggcccccgctgtgcttgcacctggcatcctcgtgctcctgtttaccttggtgcagaggagcaatggggagtgtaaagaggcactagcaaagtccgagatgaatgcgaatatgaagtatcagcttcccaacttcaccgcggaaacacccatccagaatgtcattctacatgagcatcacattttccttggtgccactaactacatttatgttttaaatgaggaagaccttcagaaggttgctgagtacaagactgggcctgtgctggaacacccagattgtttcccatgtcaggactgcagcagcaaagccaatttatcaggaggtgtttggaaagataacatcaacatggctctagttgtcgacacctactatgatgatcaactcattagctgtggcagcgtcaacagagggacctgccagcgacatgtctttccccacaatcatactgctgacatacagtcggaggttcactgcatattctccccacagatagaagagcccagccagtgtcctgactgtgtggtgagcgccctgggagccaaagtcctttcatctgtaaaggaccggttcatcaacttctttgtaggcaataccataaattcttcttatttcccagatcatccattgcattcgatatcagtgaggaggctaaaggaaacgaaagatggttttatgtttttgacggaccagtcctacattgatgttttacctgagttcagagattcttaccccattaagtatgtccatgcctttgaaagcaacaattttatttacttcttgacggtccaaagggaaactctagatgctcagacttttcacacaagaataatcaggttctgttccataaactctggattgcattcctacatggaaatgcctctggagtgtattctcacagaaaagagaaaaaagagatccacaaagaaggaagtgtttaatatacttcaggctgcgtatgtcagcaagcctggggcccagcttgctagacaaataggagccagcctgaatgatgacattcttttcggggtgttcgcacaaagcaagccagattctgccgaaccaatggatcgatctgccatgtgtgcattccctatcaaatatgtcaacgacttcttcaacaagatcgtcaacaaaaacaatgtgagatgtctccagcatttttacggacccaatcatgagcactgctttaataggacacttctgagaaattcatcaggctgtgaagcgcgccgtgatgaatatcgaacagagtttaccacagctttgcagcgcgttgacttattcatgggtcaattcagcgaagtcctcttaacatctatatccaccttcattaaaggagacctcaccatagctaatcttgggacatcagagggtcgcttcatgcaggttgtggtttctcgatcaggaccatcaacccctcatgtgaattttctcctggactcccatccagtgtctccagaagtgattgtggagcatacattaaaccaaaatggctacacactggttatcactgggaagaagatcacgaagaccccattgaatggcttgggctgcagacatttccagtcctgcagtcaatgcctctctgccccaccctttgttcagtgtggctggtgccacgacaaatgtgtgcgatcggaggaatgcctgagcgggacatggactcaacagatctgtctgcctgcaatctacaaggttttcccaaatagtgcaccccttgaaggagggacaaggctgaccatatgtggctgggactttggatttcggaggaataataaatttgatttaaagaaaactagagttctccttggaaatgagagctgcaccttgactttaagtgagagcacgatgaatacattgaaatgcacagttggtcctgccatgaataagcatttcaatatgtccataattatttcaaatggccacgggacaacacagtacagtacattctcctatgtgttactttgttttgtttttatctcccctccaggatcctgtaataacaagtatttcgccgaaatacggtcctatggctggtggcactttacttactttaactggaaattacctaaacagtgggaattctagacacatttcaattggtggaaaaacatgtactttaaaaaggtgttgtaaatttattttttgttgcatctgtcaatttgaattaatatctgtaccttaaaaa

SEQ ID NO: 101 - protein, 697 aa, Homo Sapiens [sequence omitted]

SEQ ID NO: 102 - DNA, 2082 bp, Homo Sapiens
  SR020G03
aatgaaggcccccgctgtgcttgcacctggcatcctcgtgctcctgtttaccttggtgcagaggagcaatggggagtgtaaagaggcactagcaaagtccgagatgaatgtgaatatgaagtatcagcttcccaacttcaccgcggaaacacccatccagaatgtcattctacatgagcatcacattttccttggtgccactaactacatttatgttttaaatgaggaagaccttcagaaggttgctgagtacaagactgggcctgtgctggaacacccagattgtttcccatgtcaggactgcagcagcaaagccaatttatcaggaggtgtttggaaagataacatcaacatggctctagttgtcgacacctactatgatgatcaactcattagctgtggcagcgtcaacagagggacctgccagcgacatgtctttccccacaatcatactgctgacatacagtcggaggttcactgcatattctccccacagatagaagagcccagccagtgtcctgactgtgtggtgagcgccctgggagccaaagtcctttcatctgtaaaggaccggttcatcaacttctttgtaggcaataccataaattcttcttatttcccagatcatccattgcattcgatatcagtgagaaggctaaaggaaacgaaagatggttttatgtttttgacggaccagtcctacattgatgttttacctgagttcagagattcttaccccattaagtatgtccatgcctttgaaagcaacaattttatttacttcttgacggtccaaagggaaactctagatgctcagacttttcacacaagaataatcaggttctgttccataaactctggattgcattcctacatggaaatgcctctggagtgtattctcacagaaaagagaaaaaagagatccacaaagaaggaagtgtttaatatacttcaggctgcgtatgtcagcaagcctggggcccagcttgctagacaaataggagccagcctgaatgatgacattcttttcggggtgttcgcacaaagcaagccagattctgccgaaccaatggatcgatctgccatgtgtgcattccctatcaaatatgtcaacgacttcttcaacaagatcgtcaacaaaaacaatgtgagatgtctccagcatttttacggacccaatcatgagcactgctttaataggacacttctgagaaattcatcaggctgtgaagcgcgccgtgatgaatatcgaacagagtttaccacagctttgcagcgcgttgacttattcatgggtcaattcagcgaagtcctcttaacatctatatccaccttcattaaaggagacctcaccatagctaatcttgggacatcagagggtcgcttcatgcaggttgtggtttctcgatcaggaccatcaacccctcatgtgaattttctcctggactcccatccagtgtctccagaagtgattgtggagcatacattaaaccaaaatggctacacactggttatcactgggaagaagtgtggctggcgccacgacaaatgtgtgcgatcggaggaatgcctgagcgggacatggactcaacagatctgtctgcctgcaatctacaaggttttcccaaatagtgcaccccttgaaggagggacaaggctgaccatatgtggctgggactttggatttcggaggaataataaatttgatttaaagaaaactagagttctccttggaaatgagagctgcaccttgactttaagtgagagcacgatgaatacattgaaatgcacagttggtcctgccatgaataagcatttcaatatgtccataattatttcaaatggccacgggacaacacaatacagtacattctcctatgtggatcctgtaataacaagtatttcgccgaaatacggtcctatggctggtggcactttacttactttaactggaaattacctaaacagtgggaattctagacacatttcaattggtggaaaaacatgtactctaaaaaggtgtggtaaatttattttttgttgcatctgtcaatttgaattaatatctgtaccttaaaaatt

SEQ ID NO: 103 - protein, 691 aa, Homo Sapiens [sequence omitted]

SEQ ID NO: 104 - DNA, 2294 bp, Homo Sapiens
  SR020G07
atgaaggcccccgctgtgcttgcacctggcatcctcgtgctcctgtttaccttggtgcagaggagcaatggggagtgtaaagaggcactagcaaagtccgagatgaatgtgaatatgaagtatcagcttcccaacttcaccgcggaaacacccatccagaatgtcattctacatgagcatcacattttccttggtgccactaactacatttatgttttaaatgaggaagaccttcagaaggttgctgagtacaagactgggcctgtgctggaacacccagattgtttcccatgtcaggactgcagcagcaaagccaatttatcaggaggtgtttggaaagataacatcaacatggctctagttgtcgacacctactatgatgatcaactcattagctgtggcagcgtcaacagagggacctgccagcgacatgtctttccccacaatcatactgctgacatacagtcggaggttcactgcatattctccccacagatagaagagcccagccagtgtcctgactgtgtggtgagcgccctgggagccaaagtcctttcatctgtaaaggaccggttcatcaacttctttgtaggcaataccataaattcttcttatttcccagatcatccattgcattcgatatcagtgagaaggctaaaggaaacgaaagatggttttatgtttttgacggaccagtcctacattgatgttttacctgagttcagagattcttaccccattaagtatgtccatgcctttgaaagcaacaattttatttacttcttgacggtccaaagggaaactctagatgctcagacttttcacacaagaataatcaggttctgttccataaactctggattgcattcctacatggaaatgcctctggagtgtattctcacagaaaagagaaaaaagagatccacaaagaaggaagtgtttaatatacttcaggctgcgtatgtcagcaagcctggggcccagcttgctagacaaataggagccagcctgaatgatgacattcttttcggggtgttcgcacaaagcaagccagattctgccgaaccaatggatcgatctgccatgtgtgcattccctatcaaatatgtcaacgacttcttcaacaagatcgtcaacaaaaacaatgtgagatgtctccagcatttttacggacccaatcatgagcactgctttaataggacacttctgagaaattcatcaggctgtgaagcgcgccgtgatgaatatcgaacagagtttaccacagctttgcagcgcgttgacttattcatgggtcaattcagcgaagtcctcttaacatctatatccaccttcattaaaggagacctcaccatagctaatcttgggacatcagagggtcgcttcatgcaggttgtggtttctcgatcaggaccatcaacccctcatgtgaattttctcctggactcccatccagtgtctccagaagtgattgtggagcatacattaaaccaaaatggctacacactggttatcactgggaagaagatcgcgaagatcccattgaatggcttgggttgcagacatttccagtcctgcagtcaatgcctctctgccccaccctttgttcagtgtggctggtgccacgacaaatgtgtgcgatcggaggaatgcctgagcgggacatggactcaacagatctgtctgcctgcaatctacaaggttttcccaaatagtgcaccccttgaaggagggacaaggctgaccatatgtggctgggactttggatttcggaggaataataaatttgatttaaagaaaactagagttctccttggaaatgagagctgcaccttgactttaagtgagagcacgatgaatacattgaaatgcacagttggtcctgccatgaataagcatttcaatatgtccataattatttcaaatggccacgggacaacacagtacagtacattctcctatgtgctcccctccaggatcctgtaataacaagtatttcgccgaaatacggtcctatggctggtggcactttacttactttaactggaaattacctaaacagtgggaattctagacacatttcaattggtggaaaaacatgtactttaaaaagtgtgtcaaacagtattcttgaatgttataccccagcccaaaccatttcaactgagtttgctgttaaattgaaaattgacttagccaaccgagagacaagcatcttcagttaccgtgaagatcccattgtctatgaaattcatccaaccaaatcttttattaggtaagtagaagcttctgat

SEQ ID NO: 105 - protein, 661 aa, Homo Sapiens [sequence omitted]

SEQ ID NO: 106 - DNA, 3256 bp, Homo Sapiens
  SR020H03
atgaaggcccccgctgtgcttgcacctggcatcctcgtgctcctgtttaccttggtgcagaggagcaatggggagtgtaaagaggcactagcaaagtccgagatgaatgtgaatatgaagtatcagcttcccaacttcaccgcggaaacacccatccagaatgtcattctacatgagcatcacattttccttggtgccactaactacatttatgttttaaatgaggaagaccttcagaaggttgctgagtacaagactgggcctgtgctggaacacccagattgtttcccatgtcaggactgcagcagcaaagccaatttatcaggaggtgtttggaaagataacatcaacatggctctagttgtcgacacctactatgatgatcaactcattagctgtggcagcgtcaacagagggacctgccagcgacatgtctttccccacaatcatactgctgacatacagtcggaggttcactgcatattctccccacagatagaagagcccagccagtgtcctgactgtgtggtgagcgccctgggagccaaagtcctttcatctgtaaaggaccggttcatcaacttctttgtaggcaataccataaattcttcttatttcccagatcatccattgcattcgatatcagtgagaaggctaaaggaaacgaaagatggttttatgtttttgacggaccagtcctacattgatgttttacctgagttcagagattcttaccccattaagtatgtccatgcctttgaaagcaacaattttatttacttcttgacggtccaaagggaaactctagatgctcagacttttcacacaagaataatcaggttctgttccataaactctggattgcattcctacatggaaatgcctctggagtgtattctcacagaaaagagaaaaaagagatccacaaagaaggaagtgtttaatatacttcaggctgcgtatgtcagcaagcctggggcccagcttgctagacaaataggagccagcctgaatgatgacattcttttcggggtgttcgcacaaagcaagccagattctgccgaaccaatggatcgatctgccatgtgtgcattccctatcaaatatgtcaacgacttcttcaacaagatcgtcaacaaaaacgatgtgagatgtctccagcatttttacggacccaatcatgagcactgctttaatgggacacttctgagaaattcatcaggctgtgaagcgcgccgtgatgaatatcgaacagagtttaccacagctttgcagcgcgttgacttattcatgggtcaattcagcgaagtcctcttaacatctatatccaccttcattaaaggagacctcaccatagctaatcttgggacatcagagggtcgcttcatgcaggttgtggtttctcgatcaggaccatcaacccctcgtgtgaattttctcctggactcccatccagtgtctccagaagtgattgtggagcatacattaaaccaaaatggctacacactggttatcactgggaagaagatcacgaagatcccattgaatggtttgggctgcagacatttccagtcctgcagtcaatgcctctctgccccaccctttgttcagtgtggctggtgctacgacaaatgtgtgcgatcggaggaatgcctgagcgggacatggactcaacagatctgtctgcctgcaatctacaaggttttcccaaatagtgcaccccttgaaggagggacaaggctgaccatatgtggctgggactttggatttcggaggaataataaatttgatttaaagaaaactagagttctccttggaaatgagagctgcaccttgactttaagtgagagcacgatgaatacatcgaaatgcacagttggtcctgccatgaataagcatttcaatatgtccataattatttcaaatggccacgggacaacacaatacagtacattctcctatgtggatcctgtaataacaagtatttcgccgaaatacggtcctatggctggtggcactttacttactttaactggaaattacctaaacagtgggaattctagacacatttcaattggtgggaaaacatgtactttaaaaagtgtgtcaaacagtattcttgaatgttataccccagcccaaaccatttcaactgagtttgctgttaaattgaaaattgacttagccaaccgagagacaagcatcttcagttaccgtgaagatcccattgtctatgtaattcatccaaccaaatcttttattaggtaagtagaagcttctgatgggtataagaaaacaatgaatacaaggatgattttgctgtagaatagtcaagaggaattgcagttttatctctggctttgatgctgttatgttgcttttgaaggcttctttccaattcaggagagaaaactatattcaggttctgagtgtagtttgacttatcaatgctagttcattccaagaagtatcttatcctgttctattacatttaaacagagtatagcaaaatagtttaatgtggcattgtagtatacatgcacttacattatgtacatatcaattctatactaaccttagtgcccagaagtggaattaccttttttcttccattctctagatatgtttttgtcctgcctgctttacacacagcttttctttatgccagactctctttgaattgatatctcattggacccagttcaatctgccttgttcccgttaattctatcagtctagcaacaatagttaagttcggttttctttgtatttttttcagaggtgaaatatttattttgtgtaattcggtgaataaaatacaaatgcatttcttaagcttatgaaatatgcattttaaaaatattttcaagttaaataagttgtttccaaagaacagttacccatgaacttccatttgatgttgactgtgcctctgacctgtaatcagtgcaggtgattaaattgaatccctctcttacagtacttggtggaaagaacctctcaacattgtcagttttctattttgctttgccagtggtgggagcacaataacaggtgttgggaaaaacctgaattcagttagtgtcccgagaatggtcataaatgtgcatgaagcaggaaggaactttacagtggtaagtcctttgagcaatggttctactcagagctctgcatctttgcctctaaccatgtggctttcatggtacctgagacatctcagtttcgcctttaaggtttgctagttaatttccttgca

SEQ ID NO: 107 - protein, 755 aa, Homo Sapiens [sequence omitted]

SEQ ID NO: 108 - DNA, 2481 bp, Homo Sapiens
  SR020H06
atgaaggcccccgctgtgcttgcacctggcatcctcgtgctcctgtttaccttggtgcagaggagcaatggggagtgtaaagaggcactagcaaagtccgagatgaatgtgaatacgaagtatcagcttcccaacttcaccgcggaaacacccatccagaatgtcattctacatgagcatcacattttccttggtgccactaactacatttatgttttaaatgaggaagaccttcagaaggttgctgagtacaagactgggcctgtgctggaacacccagattgtttcccatgtcaggactgcagcagcaaagccaatttatcaggaggtgtttggaaagataacatcaacatggctctagttgtcgacacctactatgatgatcaactcattagctgtggcagcgtcaacagagggacctgccagcgacatgtctttccccacaatcatactgctgacatacagtcggaggttcactgcatattctccccacagatagaagagcccagccagtgtcctgactgtgtggtgagcgccctgggagccaaagtcctttcatctgtaaaggaccggttcatcaacttctttgtaggcaataccataaattcttcttatttcccagatcatccattgcattcgatatcagtgagaaggctaaaggaaacgaaagatggttttatgtttttgacggaccagtcctacattgatgttttacctgagttcagagattcttaccccattaagtatgtccatgcctttgaaagcaacaattttatttacttcttgacggtccaaagggaaactctagatgctcagacttttcacacaagaataatcaggttctgttccataaactctggattgcattcctacatggaaatgcctctggagtgtattctcacagaaaagagaaaaaagagatccacaaagaaggaagtgtttaatatacttcaggctgcgtatgtcagcaagcctggggcccagcttgctagacaaataggagccagcctgaatgatgacattcttttcggggtgttcgcacaaagcaagccagattctgccgaaccaatggatcgatctgccatgtgtgcattccctatcaaatatgtcaacgacttcttcaacaagatcgtcaacaaaaacaatgtgagatgtctccagcatttttacggacccaatcatgagcactgctttaataggacacttctgagaaattcatcaggctgtgaagcgcgccgtgatgaatatcgaacagagtttaccacagctttgcagcgcgttgacttattcatgggtcaattcagcgaagtcctcttaacatctatatccaccttcattaaaggagacctcaccatagctaatcttgggacatcagagggtcgcttcatgcaggttgtggtttctcgatcaggaccatcaacccctcatgtgaattttctcctggactcccatccagtgtctccagaagtgattgtggagcatacattaaaccaaaatggctacacactggttatcactgggaagaagatcacgaagatcccattgaatggcttgggctgcagacatttccagtcctgcagtcaatgcctctctgccccaccctttgttcagtgtggctggtgccacgacaaatgtgtgcgatcggaggaatgcctgagcgggacatggactcaacagatctgtctgcctgcaatctacaaggttttcccaaatagtgcaccccttgaaggagggacaaggctgaccatatgtggctgggactttggatttcggaggaataataaatttgatttaaagaaaactagagttctccttggaaatgagagctgcaccttgactttaagtgagagcacgatgaatacattgaaatgcacagttggtcctgccatgaataagcatttcaatatgtccataattatttcaaatggccacgggacaacacaatacagtacattctcctatgtggatcctgtaataacaagtatttcgccgaaatacggtcctatggctggtggcactttacttactttaactggaaattacctaaacagtgggaattctagacacatttcaattggtggaaaaacatgtactttaaaaagtgtgtcaaacagtattcttgaatgttataccccagcccaaaccatttcaactgagtttgctgttaaattgaaaattgacttaaccaaccgagagacaagcatcttcagttaccgtgaagatcccattgtctatgaaattcatccaaccaaatcttttattagtggtgggagcacaataacaggtgttgggaaaaacctgaattcagttagtgtcccgagaatggtcataaatgtgcatgaagcaggaaggaactttacagtggtaagtcctttgagcaatggttctactcagagctctgcatctttgcctctaaccatgtggctttcatggtacctgagacatctcagtttcgcctttaaggtttgctagttaatttcc

SEQ ID NO: 109 - protein, 823 aa, Homo Sapiens [sequence omitted]

SEQ ID NO: 110 - DNA, 2667 bp, Homo Sapiens
  SR020H07
atgaaggcccccgctgtgcttgcacctggcatcctcgtgctcctgtttaccttggtgcagaggagcaatggggagtgtaaagaggcactagcaaagtccgagatgaatgtgaatatgaagtatcagcttcccaacttcaccgcggaaacacccatccagaatgtcattctacatgagcatcacattttccttggtgccactaactacatttatgttttaaatgaggaagaccttcagaaggttgctgagtacaagactgggcctgtgctggaacacccagattgtttcccatgtcaggactgcagcagcaaagccaatttatcaggaggtgtttggaaagataacatcaacatggctctagttgtcgacacctactatgatgatcaactcattagctgtggcagcgtcaacagagggacctgccagcgacatgtctttccccgcaatcatactgctgacatacagtcggaggttcactgcatattctccccacagatagaagagcccagccagtgtcctgactgtgtggtgagcgccctgggagccaaagtcctttcatctgtaaaggaccggttcaccaacttctttgtaggcaataccataaattcttcttatttcccagatcatccattgcattcgatatcagtgagaaggctaaaggaaacgaaagatggttttatgtttttgacggaccagtcctacattgatgttttacctgagttcagagattcttaccccattaagtatgtccatgcctttgaaagcaacaattttatttacttcttgacggtccaaagggaaactctagatgctcagacttttcacacaagaataatcaggttctgttccataaactctggattgcattcctacatggaaatgcctctggagtgtattctcacagaaaagagaaaaaagagatccacaaagaaggaagtgtttaatatacttcaggctgcgtatgtcagcaagcctggggcccagcttgctagacaaataggagccagcccgaatgatgacattcttttcggagtgttcgcacaaagcaagccagattctgccgaaccaatggatcgatctgccatgtgtgcattccctatcaaatatgtcaacgacttcttcaacaagatcgtcaacaaaaacaatgtgagatgtctccagcatttttacggacccaatcatgagcactgctttaataggacacttctgagaaattcatcaggctgtgaagcgcgccgtgatgaatatcgaacagagttcaccacagctttgcagcgcgttgacttattcatgggtcaattcagcgaagtcctcttaacatctatatccaccttcattaaaggagacctcaccatagctaatcttgggacatcagagggtcgcttcatgcaggttgtggtttctcgatcaggaccatcaacccctcatgtgaattttctcctggactcccatccagtgtctccagaagtgattgtggagcatacattaaaccaaaatggctacacactggttatcactgggaagaagatcacgaagatcccattgaatggcttgggctgcagacatttccagtcctgcagtcaatgcctctctgccccaccctttgttcagtgtggctggtgccacgacaaatgtgtgcgatcggaggaatgcctgagcgggacatggactcaacagatctgtctgcctgcaatctacaaggttttcccaaatagtgcaccccttgaaggagggacaaggctgaccatatgtggctgggactttggatttcggaggaataataaatttgatttaaagaaaactagagttctccttggaaatgagagctgcaccttgactttaagtgagagcacgatgaatacattgaaatgcacagttggtcctgccatgaataagcatttcaatatgtccataattatttcaaatggccacgggacaacacaatacagtacattctcctatgtggatcctgtaataacaagtatttcgccgaaatacggtcctatggctggtggcactttacttactttaactggaaattacctaaacagtgggaattctagacacatttcaattggtggaaaaacatgtactttaaaaagtgtgtcaaacagtattcttgaatgttataccccagcccaaaccatttcaactgagtttgctgttaaattgaaaattgacttagccaaccgagagacaagcatcttcagttaccgtgaagatcccattgtctatgaaattcatccaaccaaatcttttattagtggtgggagcacaataacaggtgttgggaaaaacctgaattcagttagtgtcccgagaatggtcataaatgtgcatgaagcgggaaggaactttacagtggcatgtcaacatcgctctaattcagagataatctgttgtaccactccttccctgcaacagctgaatctgcaactccccctgaaaaccaaagcctttttcatgttagatgggatcctttccaaatactttgatctcatttatgtacataatcctgtgtttaagccttttgaaaagccagtgatgatctcaatgggcaatgaaaatgtactggaaattaaggtaagaaatgctttaaacactgtcttaaatcatcagctcaaacttaattgacttcatagctatgtgaatacaattgttgtactt

SEQ ID NO: 111 - protein, 877 aa, Homo Sapiens [sequence omitted]

SEQ ID NO: 112 - DNA, 2542 bp, Homo Sapiens
  SR020H08
atgaaggcccccgctgtgcttgcacctggcatcctcgtgctcctgtttaccttggtgcagaggagcaatggggagtgtaaagaggcactagcaaagtccgagatgaatgtgaatatgaagtatcagcttcccaacttcaccgcggaaacacccatccagaatgtcattctacatgagcatcacattttccttggtgccactaactacatttatgttttaaatgaggaagaccttcagaaggttgctgagtacaagactgggcctgtgctggaacacccagattgtttcccatgtcaggactgcagcagcaaagccaatttatcaggaggtgtttggaaagataacatcaacatggctctagttgtcgacacctactatgatgatcaactcattagctgtggcagcgtcaacagagggacctgccagcgacatgtctttccccacaatcatactgctgacatacagtcggaggttcactgcatattctccccacagatagaagagcccagccagtgtcctgactgtgtggtgagcgccctgggagccaaagtcctttcatctgtaaaggaccggttcatcaacttctttgtaggcaataccataaattcttcttatttcccagatcatccattgcattcgatatcagtgagaaggctaaaggaaacgaaagatggttttatgtttttgacggaccagtcctacattgatgctttacctgagttcagagattcttaccccattaagtatgtccatgcctttgaaagcaacaattttatttacttcttgacggtccaaagggaaactctagatgctcagacttttcacacaagaataatcaggttctgttccataaactctggattgcattcctacatggaaatgcctctggagtgtattctcacagaaaagagaaaaaagagatccacaaagaaggaagtgtttaatatacttcaggctgcgtatgtcagcaagcctggggcccagcttgctagacaaataggagccagcctgaatgatgacattcttttcggggtgttcgcacaaagcaagccagattctgccgaaccaatggatcgatctgccatgtgtgcattccctatcaaatatgtcaacgacttcttcaacaagatcgtcaacaaaaacaatgtgagatgtctccagcatttttacggacccaatcatgagcactgctttaataggacacttctgagaaattcatcaggctgtgaagcgcgccgtgatgaatatcgaacagagtttaccacagctttgcagcgcgttgacttattcatgggtcaattcagcgaagtcctcttaacatctatatccaccttcattaaaggagacctcaccatagctaatcttgggacatcagagggtcgcttcatgcaggttgtggtttctcgatcaggaccatcaacccctcatgtgaattttctcctggactcccatccagtgtctccagaagtgattgtggagcatacattaaaccaaaatggctacacactggttatcactgggaggaagatcacgaagatcccattgaatggcttgggctgcagacatttccagtcctgcagtcaatgcctctctgccccaccctttgttcagtgtggctggtgccacgacaaatgtgtgcgatcggaggaatgcctgagcgggacatggactcagcagatctgtctgcctgcaatctacaaggttttcccaaatagtgcaccccttgaaggagggacaaggctgaccatatgtggctgggactttggatttcggaggaataataaatttgatttaaagaaaactagagttctccttggaaatgagagctgcaccttgactttaagtgagagcacgatgaatacattgaaatgcacagttggtcctgccatgaataagcatttcaatatgtccataattatttcaaatggccacgggacaacacaatacagtacattctcctatgtggatcctgtaataacaagtatttcgccgaaatacggtcctatggctggtggcactttacttactttaactggaaattacctaaacagtgggaattctagacacatttcaattggtggaaaaacgtgtactttaaaaagtgtgtcaaacagtattcttgaatgttataccccagcccaaaccatttcaactgagtctgctgttaaattgaaaattgacttagccaaccgagagacaagcatcttcagttaccgtgaagatcccattgtctatgaaattcatccaaccaaatcttttattaggcatgtcaacatcgctctaattcagagataatctgttgtaccactccttccctgcaacagctgaatctgcaactccccctgaaaaccaaagcctttttcatgttagatgggatcctttccaaatactttgatctcatttatgtacataatcctgtgtctaagccttttggaaagccagtgatgatctcaatgggcaatgaaaatgtactggaaattaagataagaaatgctttaaacactgtcttaaatcatcagctcaaacttaattgacttcatag

SEQ ID NO: 113 - protein, 764 aa, Homo Sapiens [sequence omitted]

SEQ ID NO: 114 - protein, 934 aa, Homo sapiens
  MET 34
MKAPAVLAPGILVLLFTLVQRSNGECKEALAKSEMNVNMKYQLPNFTAETPIQNVILHEHHIFLGATNYIYVLNEEDLQKVAEYKTGPVLEHPDCFPCQDCSSKANLSGGVWKDNINMALVVDTYYDDQLISCGSVNRGTCQRHVFPHNHTADIQSEVHCIFSPQIEEPSQCPDCVVSALGAKVLSSVKDRFINFFVGNTINSSYFPDHPLHSISVRRLKETKDGFMFLTDQSYIDVLPEFRDSYPIKYVHAFESNNFIYFLTVQRETLDAQTFHTRIIRFCSINSGLHSYMEMPLECILTEKRKKRSTKKEVFNILQAAYVSKPGAQLARQIGASLNDDILFGVFAQSKPDSAEPMDRSAMCAFPIKYVNDFFNKIVNKNNVRCLQHFYGPNHEHCFNRTLLRNSSGCEARRDEYRTEFTTALQRVDLFMGQFSEVLLTSISTFIKGDLTIANLGTSEGRFMQVVVSRSGPSTPHVNFLLDSHPVSPEVIVEHTLNQNGYTLVITGKKITKIPLNGLGCRHFQSCSQCLSAPPFVQCGWCHDKCVRSEECLSGTWTQQICLPAIYKVFPNSAPLEGGTRLTICGWDFGFRRNNKFDLKKTRVLLGNESCTLTLSESTMNTLKCTVGPAMNKHFNMSIIISNGHGTTQYSTFSYVDPVITSISPKYGPMAGGTLLTLTGNYLNSGNSRHISIGGKTCTLKSVSNSILECYTPAQTISTEFAVKLKIDLANRETSIFSYREDPIVYEIHPTKSFISGGSTITGVGKNLNSVSVPRMVINVHEAGRNFTVACQHRSNSEIICCTTPSLQQLNLQLPLKTKAFFMLDGILSKYFDLIYVHNPVFKPFEKPVMISMGNENVLEIKGNDIDPEAVKGEVLKVGNKSCENIHLHSEAVLCTVPNDLLKLNSELNIEVGFLHSSHDVNKEASVIMLFSGLK

SEQ ID NO: 115 - DNA, 1589 bp, Homo Sapiens
  CDS (29)...(1516): SR004C11
ggatcctctagggtcccagctcgcctcgatggagctcctcccgccgctgcctcagtccttcctgttgctgctgctgttgcctgccaagcccgcggcgggcgaggactggcagtgcccgcgcaccccctacgcggcctctcgcgactttgacgtgaagtacgtggtgcccagcttctccgccggaggcctggtacaggccatggtgacctacgagggcgacagaaatgagagtgctgtgtttgtagccatacgcaatcgcctgcatgtgcttgggcctgacctgaagtctgtccagagcctggccacgggccctgctggagaccctggctgccagacgtgtgcagcctgtggcccaggaccccacggccctcccggtgacacagacacaaaggtgctggtgctggatcccgcgctgcctgcgctggtcagttgtggctccagcctgcagggccgctgcttcctgcatgacctagagccccaagggacagccgtgcatctggcagcgccagcctgcctcttctcagcccaccataaccggcccgatgactgccccgactgtgtggccagcccattgggcacccgtgtaactgtggttgagcaaggccaggcctcctatttctacgtggcatcctcactggacgcagccgtggctgccagcttcagcccacgctcagtgtctatcaggcgtctcaaggctgacgcctcgggattcgcaccgggctttgtggcgttgtcagtgctgcccaagcatcttgtctcctacagtattgaatacgtgcacagcttccacacgggagccttcgtatacttcctgactgtacagccggccagcgtgacagatgatcctagtgccctgcacacacgcctggcacggcttagcgccactgagccagagttgggtgactatcgggagctggtcctcgactgcagatttgctccaaaacgcaggcgccggggggccccagaaggcggacagccctaccctgtgctgcgggtggcccactccgctccagtgggtgcccaacttgccactgagctgagcatcgccgagggccaggaagtactatttggggtctttgtgactggcaaggatggtggtcctggcgtgggccccaactctgtcgtctgtgccttccccattgacctgctggacacactaattgatgagggtgtggagcgctgttgtgaatccccagtccatccaggcctccggcgaggcctcgacttcttccagtcgcccagtttttgccccaacccgcctggcctggaagccctcagccccaacaccagctgccgccacttccctctgctggtcagtagcagcttctcacgtgtggacctattcaatgggctgttgggaccagtacaggtcactgcattgtatgtgacacgccttgacaacgtcacagtggcacacatgggcacaatggatgggcgtatcctgcaggtgggtcctcatccccacagtcccctagccctgggtccttgtctccatccccattttgctcacatctgacctgtcctaggtggagctggtcaggtcactaaactacttgctgtatgtgtccaacttctcactgggtgacagt

SEQ ID NO: 116 - protein, 495 aa, Homo Sapiens
  SR004C11
MELLPPLPQSFLLLLLLPAKPAAGEDWQCPRTPYAASRDFDVKYVVPSFSAGGLVQAMVTYEGDRNESAVFVAIRNRLHVLGPDLKSVQSLATGPAGDPGCQTCAACGPGPHGPPGDTDTKVLVLDPALPALVSCGSSLQGRCFLHDLEPQGTAVHLAAPACLFSAHHNRPDDCPDCVASPLGTRVTVVEQGQASYFYVASSLDAAVAASFSPRSVSIRRLKADASGFAPGFVALSVLPKHLVSYSIEYVHSFHTGAFVYFLTVQPASVTDDPSALHTRLARLSATEPELGDYRELVLDCRFAPKRRRRGAPEGGQPYPVLRVAHSAPVGAQLATELSIAEGQEVLFGVFVTGKDGGPGVGPNSVVCAFPIDLLDTLIDEGVERCCESPVHPGLRRGLDFFQSPSFCPNPPGLEALSPNTSCRHFPLLVSSSFSRVDLFNGLLGPVQVTALYVTRLDNVTVAHMGTMDGRILQVGPHPHSPLALGPCLHPHFAHI

SEQ ID NO: 117 - DNA, 3113 bp, Homo Sapiens
  SR014C01
ggtcccagctcgcctcgatggagctcctcccgccgctgcctcagtccttcctgttgctgctgctgttgcctgccaagcccgcggcgggcgaggactggcagtgcccgcgcaccccctacgcggcctctcgcgactttgacgtgaagtacgtggtgcccagcttctccgccggaggcctggtacaggccatggtgacctacgagggcgacagaaatgagagtgctgtgtttgtagccatacgcaatcgcctgcatgtgcttgggcctgacctgaagtctgtccagagcctggccacgggccctgctggagaccctggctgccagacgtgtgcagcctgtggcccaggaccccacggccctcccggtgacacagacacaaaggtgctggtgctggatcccgcgctgcctgcgctggtcagttgtggctccagcctgcagggccgctgcttcctgcatgacctagagccccaagggacagccgtgcatctggcagcgccagcctgcctcttctcagcccaccataaccggcccgatgactgccccgactgtgtggccagcccattgggcacccgtgtaactgtggttgagcaaggccaggcctcctatttctacgtggcatcctcactggacgcagccgtggctgccagcttcagcccacgctcagtgtctatcaggcgtctcaaggctgacgcctcgggattcgcaccgggctttgtggcgttgtcagtgctgcccaagcatcttgtctcctacagtattgaatacgtgcacagcttccacacgggagccttcgtatacttcctgactgtacagccggccagcgtgacagatgatcctagtgccctgcacacacgcctggcacggcttagcgccactgagccagagttgggtgactatcgggagctggtcctcgactgcagatttgctccaaaacgcaggcgccggggggccccagaaggcggacagccctaccctgtgctgcgggtggcccactccgctccagtgggtgcccaacttgccactgagctgagcatcgccgagggccaggaagtactatttggggtctttgtgactggcaaggatggtggtcctggcgtgggccccaactctgtcgtctgtgccttccccattgacctgctggacacactaattgatgagggtgtggagcgctgttgtgaatccccagtccatccaggcctccggcgaggcctcgacttcttccagtcgcccagtttttgccccaacccggttttccaggtacctatccaaggccctggctgccgccacttcctgacctgtgggcgttgcctaagggcatggcatttcatgggctgtggctggtgtgggaacatgtgcggccagcagaaggagtgtcctggctcctggcaacaggaccactgcccacctaagcttactgagttccacccccacagtggacctctaaggggcagtacaaggctgaccctgtgtggctccaacttctaccttcacccttctggtctggtgcctgagggaacccatcaggtcactgtgggccaaagtccctgccggccactgcccaaggacagctcaaaactcaggtacaatctggtccctcccctccctttccctgaagggggaaaccaagcagccccttccccatgagaccctgttctctgcttatcagaggcaaggggggatgggggaagctgcagtggttctgactgctttttgagagtcaaaaaggtctctgtccctttttgagctttcatgtgcccttcctgtctgttcactcatggaccagccaaggttaatctctgccccaccagaaccttccttccatggagggaggcatgggtggagaaatgccattctctggctcagaggagccctgtggcttgtggcaggcatgcatctaggcctgtgtaattcctggctgacctcaggggttcccctggtgccccagaccagtgccccggaaagactttgtagaggagtttgagtgtgaactggagcccttgggcacccaggcagtggggcctaccaacgtcagcctcaccgtgactaacatgccaccgggcaagcacttccgggtagacggcacctccgtgctgagaggcttctctttcatggagccagtgctgatagcagtgcaacccctctttggcccacgggcaggaggcacctgtctcactcttgaaggccagagtctgtctgtaggcaccagccgggctgtgctggtcaatgggactgagtgtctgctagcacgggtcagtgaggggcagcttttatgtgccacaccccctggggccacggtggccagtgtcccccttagcctgcaggtggggggtgcccaggtacctggttcctggaccttccagtacagagaagaccctgtcgtgctaagcatcagccccaactgtggctacatcaactcccacatcaccatctgtggccagcatctaacttcagcatggcacttagtgctgtcattccatgacgggcttagggcagtggaaagcaggtgtgagaggcagcttccagagcagcagctgtgccgccttcctgaatatgtggtccgagacccccagggatgggtggcagggaatctgagtgcccgaggggatggagctgctggctttacactgcctggctttcgcttcctacccccaccccatccacccagtgccaacctagttccactgaagcctgaggagcatgccattaagtttgaggtaagtgtaagggataggggcagggacagttggggatctgaaagtaggggccagcctactggctggtcctcatgaccctctctgcagtatattgggctgggcgctgtggctgactgtgtgggtatcaacgtgaccgtgggtggtgagagctgccagcacgagttccggggggacatggttgtctgccccctgcccccatccctgcagcttggccaggatggtgccccattgcaggtctgcgtagatggtgaatgtcatatcctgggtagagtggtgcggccagggccagatggggtcccacagagcacgctccttggtatcctgctgcctttgctgctgcttgtggctgcactggcgactgcactggtcttcagctactggtggcggaggaagcagctag

SEQ ID NO: 118 - protein, 541 aa, Homo Sapiens
  SR014C01
MELLPPLPQSFLLLLLLPAKPAAGEDWQCPRTPYAASRDFDVKYVVPSFSAGGLVQAMVTYEGDRNESAVFVAIRNRLHVLGPDLKSVQSLATGPAGDPGCQTCAACGPGPHGPPGDTDTKVLVLDPALPALVSCGSSLQGRCFLHDLEPQGTAVHLAAPACLFSAHHNRPDDCPDCVASPLGTRVTVVEQGQASYFYVASSLDAAVAASFSPRSVSIRRLKADASGFAPGFVALSVLPKHLVSYSIEYVHSFHTGAFVYFLTVQPASVTDDPSALHTRLARLSATEPELGDYRELVLDCRFAPKRRRRGAPEGGQPYPVLRVAHSAPVGAQLATELSIAEGQEVLFGVFVTGKDGGPGVGPNSVVCAFPIDLLDTLIDEGVERCCESPVHPGLRRGLDFFQSPSFCPNPVFQVPIQGPGCRHFLTCGRCLRAWHFMGCGWCGNMCGQQKECPGSWQQDHCPPKLTEFHPHSGPLRGSTRLTLCGSNFYLHPSGLVPEGTHQVTVGQSPCRPLPKDSSKLRYNLVPPLPFPEGGNQAAPSP

SEQ ID NO: 119 - DNA, 3069 bp, Homo Sapiens
  SR014C09
ggtcccagctcgcctcgatggagctcctcccgccgctgcctcagtccttcctgttgctgctgctgttgcctgccaagcccgcggcgggcgaggactggcagtgcccgcgcaccccctacgcggcctctcgcgactttgacgtgaagtacgtggtgcccagcttctccgccggaggcctggtacaggccatggtgacctacgagggcgacagaaatgagagtgctgtgtttgtagccatacgcaatcgcctgcatgtgcttgggcctgacctgaagtctgtccagagcctggccacgggccctgctggagaccctggctgccagacgtgtgcagcctgtggcccaggaccccacggccctcccggtgacacagacacaaaggtgctggtgctggatcccgcgctgcctgcgctggtcagttgtggctccagcctgcagggccgctgcttcctgcatgacctagagccccaagggacagccgtgcatctggcagcgccagcctgcctcttctcagcccaccataaccggcccgatgactgccccgactgtgtggccagcccattgggcacccgtgtaactgtggttgagcaaggccaggcctcctatttctacgtggcatcctcactggacgcagccgtggctgccagcttcagcccacgctcagtgtctatcaggcgtctcaaggctgacgcctcgggattcgcaccgggctttgtggcgttgtcagtgctgcccaagcatcttgtctcctacagtattgaatacgtgcacagcttccacacgggagccttcgtatacttcctgactgtacagccggccagcgtgacagatgatcctagtgccctgcacacacgcctggcacggcttagcgccactgagccagagttgggtgactatcgggagctggtcctcgactgcagatttgctccaaaacgcaggcgccggggggccccagaaggcggacagccctaccctgtgctgcgggtggcccactccgctccagtgggtgcccaacttgccactgagctgagcatcgccgagggccaggaagtactatttggggtctttgtgactggcaaggatggtggtcctggcgtgggccccaactctgtcgtctgtgccttccccattgacctgctggacacactaattgatgagggtgtggagcgctgttgtgaatccccagtccatccaggcctccggcgaggcctcgacttcttccagtcgcccagtttttgccccaacccgcctggcctggaagccctcagccccaacaccagctgccgccacttccctctgctggtcagtagcagcttctcacgtgtggacctattcaatgggctgttgggaccagtacaggtcactgcattgtatgtgacacgccttgacaacgtcacagtggcacacatgggcacaatggatgggcgtatcctgcaggtggagctggtcaggtcactaaactacttgctgtatgtgtccaacttctcactgggtgacagtgggcagcccgtgcagcgggatgtcagtcgtcttggggaccacctactctttgcctctggggaccaggttttccaggtacctatccaaggccctggctgccgccacttcctgacctgtgggcgttgcctaagggcatggcatttcatgggctgtggctggtgtgggaacatgtgcggccagcagaaggagtgtcctggctcctggcaacaggaccactgcccacctaagcttactgagttccacccccacagtggacctctaaggggcagtacaaggctgaccctgtgtggctccaacttctaccttcacccttctggtctggtgcctgagggaacccatcaggtcactgtgggccaaagtccctgccggccactgcccaaggacagctcaaaactcagaccagtgccccggaaagactttgtagaggagtttgagtgtgaactggagcccttgggcacccaggcagtggggcctaccaacgtcagcctcaccgtgactaacatgccaccgggcaagcacttccgggtagacggcacctccgtgctgagaggcttctctttcatggagccagtgctgatagcagtgcaacccctctttggcccacgggcaggaggcacctgtctcactcttgaaggccagagtctgtctgtaggcaccagccgggctgtgctggtcaatgggactgagtgtctgctagcacgggtcagtgaggggcagcttttatgtgccacaccccctggggccacggtggccagtgtcccccttagcctgcaggtggggggtgcccaggtacctggttcctggaccttccagtacagagaagaccctgtcgtgctaagcatcagccccaactgtggctacatcaactcccacatcaccatctgtggccagcatctaacttcagcatggcacttagtgctgtcattccatgacgggcttagggcagtggaaagcaggcagtgtgagaggcagcttccagagcagcagctgtgccgccttcctgaatatgtggtccgagacccccagggatgggtggcagggaatctgagtgcccgaggggatggagctgctggctttacactgcctggctttcgcttcctacccccaccccatccacccagtgccaacctagttccactgaagcctgaggagcatgccattaagtttgaggtaagtgtaagggataggggcagggacagttggggatctgaaagtaggggccagcctactggctggtcctcatgaccctctctgcagtatattgggctgggcgctgtggctgactgtgtgggtatcaacgtgaccgtgggtggtgagagctgccagcacgagttccggggggacatggttgtctgccccctgcccccatccctgcagcttggccaggatggtgccccattgcaggtctgcgtagatggtgaatgtcatatcctgggtagagtggtgcggccagggccagatggggtcccacagagcacgctccttggtatcctgctgcctttgctgctgcttgtggctgcactggcgactgcactggtcttcagctactggtggcggaggaagcagctag

SEQ ID NO: 120 - protein, 908 aa, Homo Sapiens
  SR014C09
MELLPPLPQSFLLLLLLPAKPAAGEDWQCPRTPYAASRDFDVKYVVPSFSAGGLVQAMVTYEGDRNESAVFVAIRNRLHVLGPDLKSVQSLATGPAGDPGCQTCAACGPGPHGPPGDTDTKVLVLDPALPALVSCGSSLQGRCFLHDLEPQGTAVHLAAPACLFSAHHNRPDDCPDCVASPLGTRVTVVEQGQASYFYVASSLDAAVAASFSPRSVSIRRLKADASGFAPGFVALSVLPKHLVSYSIEYVHSFHTGAFVYFLTVQPASVTDDPSALHTRLARLSATEPELGDYRELVLDCRFAPKRRRRGAPEGGQPYPVLRVAHSAPVGAQLATELSIAEGQEVLFGVFVTGKDGGPGVGPNSVVCAFPIDLLDTLIDEGVERCCESPVHPGLRRGLDFFQSPSFCPNPPGLEALSPNTSCRHFPLLVSSSFSRVDLFNGLLGPVQVTALYVTRLDNVTVAHMGTMDGRILQVELVRSLNYLLYVSNFSLGDSGQPVQRDVSRLGDHLLFASGDQVFQVPIQGPGCRHFLTCGRCLRAWHFMGCGWCGNMCGQQKECPGSWQQDHCPPKLTEFHPHSGPLRGSTRLTLCGSNFYLHPSGLVPEGTHQVTVGQSPCRPLPKDSSKLRPVPRKDFVEEFECELEPLGTQAVGPTNVSLTVTNMPPGKHFRVDGTSVLRGFSFMEPVLIAVQPLFGPRAGGTCLTLEGQSLSVGTSRAVLVNGTECLLARVSEGQLLCATPPGATVASVPLSLQVGGAQVPGSWTFQYREDPVVLSISPNCGYINSHITICGQHLTSAWHLVLSFHDGLRAVESRQCERQLPEQQLCRLPEYVVRDPQGWVAGNLSARGDGAAGFTLPGFRFLPPPHPPSANLVPLKPEEHAIKFEVSVRDRGRDSWGSESRGQPTGWSS

SEQ ID NO: 121 - DNA, 3500 bp, Homo Sapiens
  SR014E12
ggtcccagctcgcctcgatggagctcctcccgccgctgcctcagtccttcctgttgctgctgctgttgcctgccaagcccgcggcgggcgaggactggcagtgcccgcgcaccccctacgcggcctctcgcgactttgacgtgaagtacgtggtgcccagcttctccgccggaggcctggtacaggccatggtgacctacgagggcgacagaaatgagagtgctgtgtttgtagccatacgcaatcgcctgcatgtgcttgggcctgacctgaagtctgtccagagcctggccacgggccctgctggagaccctggctgccagacgtgtgcagcctgtggcccaggaccccacggccctcccggtgacacagacacaaaggtgctggtgctggatcccgcgctgcctgcgctggtcagttgtggctccagcctgcagggccgctgcttcctgcatgacctagagccccaagggacagccgtgcatctggcagcgccagcctgcctcttctcagcccaccataaccggcccgatgactgccccgactgtgtggccagcccattgggcacccgtgtaactgtggttgagcaaggccaggcctcctatttctacgtggcatcctcactggacgcagccgtggctgccagcttcagcccacgctcagtgtctatcaggcgtctcaaggctgacgcctcgggattcgcaccgggctttgtggcgttgtcagtgctgcccaagcatcttgtctcctacagtattgaatacgtgcacagcttccacacgggagccttcgtatacttcctgactgtacagccggccagcgtgacagatgatcctagtgccctgcacacacgcctggcacggcttagcgccactgagccagagttgggtgactatcgggagctggtcctcgactgcagatttgctccaaaacgcaggcgccggggggccccagaaggcggacagccctaccctgtgctgcgggtggcccactccgctccagtgggtgcccaacttgccactgagctgagcatcgccgagggccaggaagtactatttggggtctttgtgactggcaaggatggtggtcctggcgtgggccccaactctgtcgtctgtgccttccccattgacctgctggacacactaattgatgagggtgtggagcgctgttgtgaatccccagtccatccaggcctccggcgaggcctcgacttcttccagtcgcccagtttttgccccaacccgcctggcctggaagccctcagccccaacaccagctgccgccacttccctctgctggtcagtagcagcttctcacgtgtggacctattcaatgggctgttgggaccagtacaggtcactgcattgtatgtgacacgccttgacaacgtcacagtggcacacatgggcacaatggatgggcgtatcctgcaggtggagctggtcaggtcactaaactacttgctgtatgtgtccaacttctcactgggtgacagtgggcagcccgtgcagcgggatgtcagtcgtcttggggaccacctactctttgcctctggggaccaggttttccaggtacctatccaaggccctggctgccgccacttcctgacctgtgggcgttgcctaagggcatggcatttcatgggctgtggctggtgtgggaacatgtgcggccagcagaaggagtgtcctggctcctggcaacaggaccactgcccacctaagcttactgagttccacccccacagtggacctctaaggggcagtacaaggctgaccctgtgtggctccaacttctaccttcacccttctggtctggtgcctgagggaacccatcaggtcactgtgggccaaagtccctgccggccactgcccaaggacagctcaaaactcaggtacaatctggtccctcccctccctttccctgaagggggaaaccaagcagccccttccccatgagaccctgttctctgcttatcagaggcaaggggggatgggggaagctgcagtggttctgactgctttttgagagtcaaaaaggtctctgtccctttttgagctttcatgtgcccttcctgtctgttcactcatggaccagccaaggttaatctctgccccaccagaaccttccttccatggagggaggcatgggtggagaaatgccattctctggctcagaggagccctgtggcttgtggcaggcatgcatctaggcctgtgtaattcctggctgacctcaggggttcccctggtgccccagaccagtgccccggaaagactttgtagaggagtttgagtgtgaactggagcccttgggcacccaggcagtggggcctaccaacgtcagcctcaccgtgactaacatgccaccgggcaagcacttccgggtagacggcacctccgtgctgagaggcttctctttcatggagccagtgctgatagcagtgcaacccctctttggcccacgggcaggaggcacctgtctcactcttgaaggccagagtctgtctgtaggcaccagccgggctgtgctggtcaatgggactgagtgtctgctagcacgggtcagtgaggggcagcttttatgtgccacaccccctggggccacggtggccagtgtcccccttagcctgcaggtggggggtgcccaggtacctggttcctggaccttccagtacagagaagaccctgtcgtgctaagcatcagccccaactgtggctacatcaactcccacatcaccatctgtggccagcatctaacttcagcatggcacttagtgctgtcattccatgacgggcttagggcagtggaaagcaggtgtgagaggcagcttccagagcagcagctgtgccgccttcctgaatatgtggtccgagacccccagggatgggtggcagggaatctgagtgcccgaggggatggagctgctggctttacactgcctggctttcgcttcctacccccaccccatccacccagtgccaacctagttccactgaagcctgaggagcatgccattaagtttgaggtaagtgtaagggataggggcagggacagttggggatctgaaagtaggggccagcctactggctggtcctcatgaccctctctgcagtatattgggctgggcgctgtggctgactgtgtgggtatcaacgtgaccgtgggtggtgagagctgccagcacgagttccggggggacatggttgtctgccccctgcccccatccctgcagcttggccaggatggtgccccattgcaggtaggcagcccagctggacctccctgggaaacacgggcagagggcctacaggctgggcctgagttgccacctgcccccaggtctgcgtagatggtgaatgtcatatcctgggtagagtggtgcggccagggccagatggggtcccacagagcacgctccttggtatcctgctgcctttgctgctgcttgtggctgcactggcgactgcactggtcttcagctactggtggcggag

SEQ ID NO: 122 - protein, 647 aa, Homo Sapiens
  SR014E12
MELLPPLPQSFLLLLLLPAKPAAGEDWQCPRTPYAASRDFDVKYVVPSFSAGGLVQAMVTYEGDRNESAVFVAIRNRLHVLGPDLKSVQSLATGPAGDPGCQTCAACGPGPHGPPGDTDTKVLVLDPALPALVSCGSSLQGRCFLHDLEPQGTAVHLAAPACLFSAHHNRPDDCPDCVASPLGTRVTVVEQGQASYFYVASSLDAAVAASFSPRSVSIRRLKADASGFAPGFVALSVLPKHLVSYSIEYVHSFHTGAFVYFLTVQPASVTDDPSALHTRLARLSATEPELGDYRELVLDCRFAPKRRRRGAPEGGQPYPVLRVAHSAPVGAQLATELSIAEGQEVLFGVFVTGKDGGPGVGPNSVVCAFPIDLLDTLIDEGVERCCESPVHPGLRRGLDFFQSPSFCPNPPGLEALSPNTSCRHFPLLVSSSFSRVDLFNGLLGPVQVTALYVTRLDNVTVAHMGTMDGRILQVELVRSLNYLLYVSNFSLGDSGQPVQRDVSRLGDHLLFASGDQVFQVPIQGPGCRHFLTCGRCLRAWHFMGCGWCGNMCGQQKECPGSWQQDHCPPKLTEFHPHSGPLRGSTRLTLCGSNFYLHPSGLVPEGTHQVTVGQSPCRPLPKDSSKLRYNLVPPLPFPEGGNQAAPSP

SEQ ID NO: 123 - DNA, 1331 bp, Homo Sapiens
  CDS (24)...(944): SR005A06
cctgccacttccccaccgaggccatgggcccaggagttctgctgctcctgctggtggccacagcttggcatggtcagggaatcccagtgatagagcccagtgtccctgagctggtcgtgaagccaggagcaacggtgaccttgcgatgtgtgggcaatggcagcgtggaatgggatggccccccatcacctcactggaccctgtactctgatggctccagcagcatcctcagcaccaacaacgctaccttccaaaacacggggacctatcgctgcactgagcctggagaccccctgggaggcagcgccgccatccacctctatgtcaaagaccctgcccggccctggaacgtgctagcacaggaggtggtcgtgttcgaggaccaggacgcactactgccctgtctgctcacagacccggtgctggaagcaggcgtctcgctggtgcgtgtgcgtggccggcccctcatgcgccacaccaactactccttctcgccctggcatggcttcaccatccacagggccaagttcattcagagccaggactatcaatgcagtgccctgatgggtggcaggaaggtgatgtccatcagcatccggctgaaagtgcagaaagtcatcccagggcccccagccttgacactggtgcctgcagagctggtgcggattcgaggggaggctgcccagatcgtgtgctcagccagcagcgttgatgttaactttgatgtcttcctccaacacaacaacaccaagctcgcaatccctcaacaatctgactttcataataaccgttaccaaaaagtcctgaccctcaacctcgatcaagtagatttccaacatgccggcaactactcctgcgtggccagcaacgtgcagggcaagcactccacctccatgttcttccgggtggtaggcacaccttcaccctctctctgccccgcctgaagccctctgaggctggccgctactccttcctggccagaaacccaggaggctggagagctctgacgtttgagctcacccttcgataccccccagaggtaagcgtcatatggacattcatcaacggctctggcacccttttgtgtgctgcctctgggtacccccagcccaacgtgacatggctgcagtgcagtggccacactgataggtgtgatgaggcccaagtgctgcaggtctgggatgacccataccctgaggtcctgagccaggagcccttccacaaggtgacggtgcagagcctgctgactgttgagaccttagagcacaaccaaacctacgagtgcagggcccacaacagcgtggggagtggctcctgggccttcataccca

SEQ ID NO: 124 - protein, 306 aa, Homo Sapiens
  SR005A06
MGPGVLLLLLVATAWHGQGIPVIEPSVPELVVKPGATVTLRCVGNGSVEWDGPPSPHWTLYSDGSSSILSTNNATFQNTGTYRCTEPGDPLGGSAAIHLYVKDPARPWNVLAQEVVVFEDQDALLPCLLTDPVLEAGVSLVRVRGRPLMRHTNYSFSPWHGFTIHRAKFIQSQDYQCSALMGGRKVMSISIRLKVQKVIPGPPALTLVPAELVRIRGEAAQIVCSASSVDVNFDVFLQHNNTKLAIPQQSDFHNNRYQKVLTLNLDQVDFQHAGNYSCVASNVQGKHSTSMFFRVVGTPSPSLCPA

SEQ ID NO: 125 - DNA, 1582 bp, Homo sapiens
  SR002H01
gatcccatcgcagctaccgcgatgagaggcgctcgcggcgcctgggattttctctgcgttctgctcctactgcttcgcgtccagacaggctcttctcaaccatctgtgagtccaggggaaccgtctccaccatccatccatccaggaaaatcagacttaatagtccgcgtgggcgacgagattaggctgttatgcactgatccgggctttgtcaaatggacttttgagatcctggatgaaacgaatgagaataagcagaatgaatggatcacggaaaaggcagaagccaccaacaccggcaaatacacgtgcaccaacaaacacggcttaagcaattccatttatgtgtttgttagagatcctgccaagcttttccttgttgaccgctccttgtatgggaaagaagacaacgacacgctggtccgctgtcctctcacagacccagaagtgaccaattattccctcaaggggtgccaggggaagcctcttcccaaggacttgaggtttattcctgaccccaaggcgggcatcatgatcaaaagtgtgaaacgcgcctaccatcggctctgtctgcattgttctgtggaccaggagggcaagtcagtgctgtcggaaaaattcatcctgaaagtgaggccagccttcaaagctgtgcctgttgtgtctgtgtccaaagcaagctatcttcttagggaaggggaagaattcacagtgacgtgcacaataaaagatgtgtctagttctgtgtactcaacgtggaaaagagaaaacagtcagactaaactacaggagaaatataatagctggcatcacggtgacttcaattatgaacgtcaggcaacgttgactatcagttcagcgagagttaatgattctggagtgttcatgtgttatgccaataatacttttggatcagcaaatgtcacaacaaccttggaagtagtagataaaggattcattaatatcttccccatgataaacactacagtatttgtaaacgatggagaaaatgtagatttgattgttgaatatgaagcattccccaaacctgaacaccagcagtggatctatatgaacagaaccttcactgataaatgggaagattatcccaagtctgagaatgaaagtaatatcagatacgtaagtgaacttcatctaacgagattaaaaggcaccgaaggaggcacttacacattcctagtgtccaattctgacgtcaatgctgccatagcatttaatgtttatgtgaatacttccctgtaaatagagtgattcggcttttaatcggcaccacccttccacccccaaaaaggagaaaattcatcaaaaccagaaatcctgacttacgacaggctcgtgaatggcatgctccaatgtgtggcagcaggattcccagagcccacaatagattggtatttttgtccaggaactgagcagagatgctctgcttctgtactgccagtggatgtgcagacactaaactcatctgggccaccgtttggaaagctagtggttcagagttctatagattctagtgcattcaagcacaatggcacggttgaatgtaaggcttacaacgatg

SEQ ID NO: 126 - protein, 413 aa, Homo sapiens
  SR002H01
MRGARGAWDFLCVLLLLLRVQTGSSQPSVSPGEPSPPSIHPGKSDLIVRVGDEIRLLCTDPGFVKWTFEILDETNENKQNEWITEKAEATNTGKYTCTNKHGLSNSIYVFVRDPAKLFLVDRSLYGKEDNDTLVRCPLTDPEVTNYSLKGCQGKPLPKDLRFIPDPKAGIMIKSVKRAYHRLCLHCSVDQEGKSVLSEKFILKVRPAFKAVPVVSVSKASYLLREGEEFTVTCTIKDVSSSVYSTWKRENSQTKLQEKYNSWHHGDFNYERQATLTISSARVNDSGVFMCYANNTFGSANVTTTLEVVDKGFINIFPMINTTVFVNDGENVDLIVEYEAFPKPEHQQWIYMNRTFTDKWEDYPKSENESNIRYVSELHLTRLKGTEGGTYTFLVSNSDVNAAIAFNVYVNTSL

SEQ ID NO: 127 - protein, 217 aa, Homo sapiens
  PDGFRA.b BUILD 31
MGTSHPAFLVLGCLLTGLSLILCQLSLPSILPNENEKVVQLNSSFSLRCFGESEVSWQYPMSEEESSDVEIRNEENNSGLFVTVLEVSSASAAHTGLYTCYYNHTQTEENELEGRHIYIYVPDPDVAFVPLGMTDYLVIVEDDDSAIIPCRTTDPETPVTLHNSEGVVPASYDSRQGFNGTFTVGPYICEATVKGKKFQTIPFNVYALKGTCIISFL

SEQ ID NO: 128 - protein, 218 aa, Artificial Sequence
  PDGFRA.c BUILD 34
MGTSHPAFLVLGCLLTGLSLILCQLSLPSILPNENEKVVQLNSSFSLRCFGESEVSWQYPMSEEESSDVEIRNEENNSGLFVTVLEVSSASAAHTGLYTCYYNHTQTEENELEGRHIYIYVPDPDVAFVPLGMTDYLVIVEDDDSAIIPCRTTDPETPVTLHNSEGVVPASYDSRQGFNGTFTVGPYICEATVKGKKFQTIPFNVYALKGTCIISFLL

SEQ ID NO: 129 - DNA, 1508 bp, Homo Sapiens
  CDS (7)...(1017): SR007C09
gacaccatgcggcttccgggtgcgatgccagctctggccctcaaaggcgagctgctgttgctgtctctcctgttacttctggaaccacagatctctcagggcctggtcgtcacacccccggggccagagcttgtcctcaatgtctccagcaccttcgttctgacctgctcgggttcagctccggtggtgtgggaacggatgtcccaggagcccccacaggaaatggccaaggcccaggatggcaccttctccagcgtgctcacactgaccaacctcactgggctagacacgggagaatacttttgcacccacaatgactcccgtggactggagaccgatgagcggaaacggctctacatctttgtgccagatcccaccgtgggcttcctccctaatgatgccgaggaactattcatctttctcacggaaataactgagatcaccattccatgccgagtaacagacccacagctggtggtgacactgcacgagaagaaaggggacgttgcactgcctgtcccctatgatcaccaacgtggcttttctggtatctttgaggacagaagctacatctgcaaaaccaccattggggacagggaggtggattctgatgcctactatgtctacagactccaggtgtcatccatcaacgtctctgtgaacgcagtgcagactgtggtccgccagggtgagaacatcaccctcatgtgcattgtgatcgggaatgaggtggtcaacttcgagtggacatacccccgcaaagaaagtgggcggctggtggagccggtgactgacttcctcttggatatgccttaccacatccgctccatcctgcacatccccagtgccgagttagaagactcggggacctacacctgcaatgtgacggagagtgtgaatgaccatcaggatgaaaaggccatcaacatcaccgtgagagcggctacgtgcggctcctgggagaggtgggcacactacaatttgctgagctgcatcggagccggacactgcaggtagtgttcgaggcctacccaccgcccactgtcctgtggttcaaagacaaccgcaccctgggcgactccagcgctggcgaaatcgccctgtccacgcgcaacgtgtcggagacccggtatgtgtcagagctgacactggttcgcgtgaaggtggcagaggctggccactacaccatgcgggccttccatgaggatgctgaggtccagctctccttccagctacagatcaatgtccctgtccgagtgctggagctaagtgagagccaccctgacagtggggaacagacagtccgctgtcgtggccggggcatgccccagccgaacatcatctggtctgcctgcagagacctcaaaaggtgtccacgtgagctgccgcccacgctgctggggaacagttccgaagaggagagccagctggagactaacgtgacgtactgggaggaggagcaggagtttgaggtggtgagcacactgcgtctgcagcacgtggatcgg

SEQ ID NO: 130 - protein, 336 aa, Homo Sapiens
  SR007C09
MRLPGAMPALALKGELLLLSLLLLLEPQISQGLVVTPPGPELVLNVSSTFVLTCSGSAPVVWERMSQEPPQEMAKAQDGTFSSVLTLTNLTGLDTGEYFCTHNDSRGLETDERKRLYIFVPDPTVGFLPNDAEELFIFLTEITEITIPCRVTDPQLVVTLHEKKGDVALPVPYDHQRGFSGIFEDRSYICKTTIGDREVDSDAYYVYRLQVSSINVSVNAVQTVVRQGENITLMCIVIGNEVVNFEWTYPRKESGRLVEPVTDFLLDMPYHIRSILHIPSAELEDSGTYTCNVTESVNDHQDEKAINITVRAATCGSWERWAHYNLLSCIGAGHCR

SEQ ID NO: 131 - DNA, 928 bp, Homo sapiens
  SR021A05
caggaccctggaaggaagcaggatggcagccggaacagcagttggagcctgggtgctggtcctcagtctgtggggggcagtagtaggtgctcaaaacatcacagcccggattggcgagccactggtgctgaagtgtaagggggcccccaagaaaccaccccagcggctggaatggaaactgaacacaggccggacagaagcttggaaggtcctgtctccccagggaggaggcccctgggacagtgtggctcgtgtccttcccaacggctccctcttccttccggctgtcgggatccaggatgaggggattttccggtgccaggcaatgaacaggaatggaaaggagaccaagtccaactaccgagtccgtgtctaccgtaagaattccagggtcttctccaaggcctccctcttacctaagaaaaagccttcaaccccagccttggcccatgagggcctctgacttccaatctgaattcgtcgacaagcttctcgagcctaggctagctctagaccacacgtgtgggggcccgagctcgcggccgctgtattctatagtgtcacctaaatggccgcacaattcactggccgtcgttttacaacgtcgtgactgggaaaaccctggcgttacccaacttaatcgccttgcagcacatccccctttcgccagctggcgtaatagcgaagaggcccgcaccgatcgcccttcccaacagttgcgcagcctgaatggcgaatggaaattgtaagcgttaatattttgttaaaattcgcgttaaatttttgttaaatcagctcattttttaaccaataggccgaaatcggcaaaatcccttataaatcaaaagaatagaccgagatagggttgagtgttgttccagtttggaacaagagtccactattaaagaacgtggactccaacgtcaaa

SEQ ID NO: 132 - protein, 146 aa, Homo sapiens
  SR021A05
MAAGTAVGAWVLVLSLWGAVVGAQNITARIGEPLVLKCKGAPKKPPQRLEWKLNTGRTEAWKVLSPQGGGPWDSVARVLPNGSLFLPAVGIQDEGIFRCQAMNRNGKETKSNYRVRVYRKNSRVFSKASLLPKKKPSTPALAHEGL

SEQ ID NO: 133 - DNA, 941 bp, Homo sapiens
  SR021F06
aggaccctggaaggaagcaggatggcagccggaacagcagttggagcctgggtgctggtcctcagtctgtggggggcagtagtaggtgctcaaaacatcacagcccggattggcgagccactggtgctgaagtgtaagggggcccccaagaaaccaccccagcggctggaatggaaactgaacacaggccggacagaagcttggaaggtcctgtctccccagggaggaggcccctgggacagtgtggctcgtgtccttcccaacggctccctcttccttccggctgtcgggatccaggatgaggggattttccggtgccaggcaatgaacaggaatggaaaggagaccaagtccaactaccgagtccgtgtctaccagattcctgggaagccagaaattgtagattctgcctctgaactcacggctggtgttcccaataaggtggggacatgtgtgtcagagggaagctaccctgcagggactcttagctggcacttggatgggaagcccctggtgcctaatgagaagggtgagtcctaaggtgccccccaagaatcacgaattctggatccgatacgtaacgcgtctgcagcatgcgtggtaccgagctttccctatagtgagtcgtattagagcttggcgtaatcatggtcatagctgtttcctgtgtgaaattgttatccgctcacaattccacacaacatacgagccggaagcataaagtgtaaagcctggggtgcctaatgagtgagctaactcacattaattgcgttgcgctcactgcccgctttccagtcgggaaacctgtcgtgccagctgcattaatgaatcggccaacgcgcggggagaggcggtttgcgtattgggcgctcttccgcttcctcgctcactgactcgctgcgctcggtcgttcggctgcggcgagcggtatcagctcactc

SEQ ID NO: 134 - protein, 172 aa, Homo sapiens [sequence omitted]

SEQ ID NO: 135 - DNA, 1165 bp, Homo sapiens
  SR021C06
atggcagccggaacagcagttggagcctgggtgctggtcctcagtctgtggggggcagtagtaggtgctcaaaacatcacagcccggattggcgagccactggtgctgaagtgtaagggggcccccaagaaaccaccccagcggctggaatggaaactgaacacaggccggacagaagcttggaaggtcctgtctccccagggaggaggcccctgggacagtgtggctcgtgtccttcccaacggctccctcttccttccggctgtcgggatccaggatgaggggattttccggtgccaggcaatgaacaggaatggaaaggagaccaagtccaactaccgagtccgtgtctaccagattcctgggaagccagaaattgtagattctgcctctgaactcacggctggtgttcccaataaggtggggacatgtgtgtcggagggaagctaccctgcagggactcttagctggcacttggatgggaagcccctggtgcctaatgagaagggagtatctgtgaaggaacagaccaggagacaccctgagacagggctcttcacactgcagtcggagctaatggtgaccccagcccggggaggagatccccgtcccaccttctcctgtagcttcagcccaggccttccccgacaccgggccttgcgcacagcccccatccagccccgtgtctgggagcctgtgcctctggaggaggtccaattggtggtggagccagaaggtggagcagtagctcctggtggaaccgtaaccctgacctgtgaagtccctgcccagccctctcctcaaatccactggatgaaggatggggtgcccttgccccttccccccagccctgtgctgatcctccctgagatagggcctcaggaccagggaacctacagctgtgtggccacccattccagccacgggccccaggaaagccgtgctgtcagcatcagcatcatcggtgagacctctccccaagccctacagaccctgggactagggtgcaggacagcacaggctctaatttcctgccccattctggccttatccctaacagccaccccacctctccctccatgcacccacacccaagcctcccctgccccacccaaattctgccaagagagcagccaagcctctcccttcttccctctgagctaaa

SEQ ID NO: 136 - protein, 387 aa, Homo sapiens
  SR021C06
MAAGTAVGAWVLVLSLWGAVVGAQNITARIGEPLVLKCKGAPKKPPQRLEWKLNTGRTEAWKVLSPQGGGPWDSVARVLPNGSLFLPAVGIQDEGIFRCQAMNRNGKETKSNYRVRVYQIPGKPEIVDSASELTAGVPNKVGTCVSEGSYPAGTLSWHLDGKPLVPNEKGVSVKEQTRRHPETGLFTLQSELMVTPARGGDPRPTFSCSFSPGLPRHRALRTAPIQPRVWEPVPLEEVQLVVEPEGGAVAPGGTVTLTCEVPAQPSPQIHWMKDGVPLPLPPSPVLILPEIGPQDQGTYSCVATHSSHGPQESRAVSISIIGETSPQALQTLGLGCRTAQALISCPILALSLTATPPLPPCTHTQASPAPPKFCQESSQASPFFPLS

SEQ ID NO: 137 - DNA, 994 bp, Homo sapiens
  SR021C02
aggaccctggaaggaagcaggatggcagccggaacagcagttggagcctgggtgctggtcctcagtctgtggggggcagtagtaggtgctcaaaacatcacagcccggattggcgagccactggtgctgaagtgtaagggggcccccaagaaaccaccccagcggctggaatggaaactgaacacaggccggacagaagcttggaaggtcctgtctccccagggaggaggcccctgggacagtgtggctcgtgtccttcccaacggctccctcttccttccggctgtcgggatccaggatgaggggattttccggtgccaggcaatgaacaggaatggaaaggagaccaagtccaactaccgagtccgtgtctaccagattcctgggaagccagaaattgtagattctgcctctgaactcacggctggtgttcccaataaggtagtggaagaaagcaggagaagtagaaaacggccctgtgaacaggaggtggggacatgtgtgtcagagggaagctaccctgcagggactcttagctggcacttggatgggaagcccctggtgcctaatgagaagggagtatctgtgaaggaacagaccaggagacaccctgagacagggctcttcacactgcagtcggagctaatggtgaccccagcccggggaggagatccccgtcccaccttctcctgtagcttcagcccaggccttccccgacaccgggccttgcgcacagcccccatccagccccgtgtctggggtgagcataggtggggagggccccaagctcacgtgagcacgttctggaagtctgacccttagggaaagagggagtaatcacgaattctggatccgatacgtaacgcgtctgcagcatgcgtggtaccgagctttccctatagtgagtcgtattagagcttggccgtaatcatggtcatagctgtttcctgtgtgaaattgttatccgctcacaatttcacacacatacgagccg

SEQ ID NO: 138 - protein, 266 aa, Homo sapiens
  SR021C02
MAAGTAVGAWVLVLSLWGAVVGAQNITARIGEPLVLKCKGAPKKPPQRLEWKLNTGRTEAWKVLSPQGGGPWDSVARVLPNGSLFLPAVGIQDEGIFRCQAMNRNGKETKSNYRVRVYQIPGKPEIVDSASELTAGVPNKVVEESRRSRKRPCEQEVGTCVSEGSYPAGTLSWHLDGKPLVPNEKGVSVKEQTRRHPETGLFTLQSELMVTPARGGDPRPTFSCSFSPGLPRHRALRTAPIQPRVWGEHRWGGPQAHVSTFWKSDP

SEQ ID NO: 139 - DNA, 1415 bp, Homo sapiens
  SR021C08
atggcagccggaacagcagttggagcctgggtgctggtcctcagtctgtggggggcagtagtaggtgctcaaaacatcacagcccggattggcgagccactggtgctgaagtgtaagggggcccccaagaaaccaccccagcggctggaatggaaactgaacacaggccggacagaagcttggaaggtcctgtctccccagggaggaggcccctgggacagtgtggctcgtgtccttcccaacggctccctcttccttccggctgtcgggatccaggatgaggggattttccggtgccaggcaatgaacaggaatggaaaggagaccaagtccaactaccgagtccgtgtctaccagattcctgggaagccagaaattgtagattctgcctctgaactcacggctggtgttcccaataaggtagtggaagaaagcaggagaagtagaaaacggccctgtgaacaggaggcgagtgtgtgtgggtgtgggtgtgtggcatctctcattttcaaaggattctgaggtcaccactctttccccaggtggggacatgtgtgtcagagggaagctaccctgcagggactcttagctggcacttggatgggaagcccctggtgcctaatgagaagggagtatctgtgaaggaacagaccaggagacaccctgagacagggctcttcacactgcagtcggagctaatggtgaccccagcccggggaggagatccccgtcccaccttctcctgtagcttcagcccaggccttccccgacaccgggccttgcgcacagcccccatccagccccgtgtctggggtgagcataggtggggagggccccaagctcacgtgagcacgttctggaagtctgacccttagggaaagagggagtcaagcccatggccactgggatcactcacaagtgtaactctccacctcaaaacccttccaactcccagagcctgtgcctctggaggaggtccaattggtggtggagccagaaggtggagcagtagctcctggtggaaccgtaaccctgacctgtgaagtccctgcccagccctctcctcaaatccactggatgaaggatggtgtgcccttgccccttccccccagccctgtgctgatcctccctgagatagggcctcaggaccagggaacctacagctgtgtggccacccattccagccacgggccccaggaaagccgtgctgtcagcatcagcatcatcgaaccaggcaaggaggggccaactgcaggtgaggggtttgataaagtcagggaagcagaagatagcccccaacacatgtgactggggggatggtcaacaagaaaggaatggaaggccccagaaaaccaggaggaagaggaggagcgtgcagaactgaatcagtcggaggaacctgaggcaggcgagaa

SEQ ID NO: 140 - protein, 173 aa, Homo sapiens [sequence omitted]

SEQ ID NO: 141 - DNA, 1505 bp, Homo Sapiens
  CDS (41)...(1144): SR007G02
tgcacatttgtggaaactggatggagagatttggggaagcatggactctttagccagcttagttctctgtggagtcagcttgctcctttctggaactgtggaaggtgccatggacttgatcttgatcaattccctacctcttgtatctgatgctgaaacatctctcacctgcattgcctctgggtggcgcccccatgagcccatcaccataggaagggactttgaagccttaatgaaccagcaccaggatccgctggaagttactcaagatgtgaccagagaatgggctaaaaaagttgtttggaagagagaaaaggctagtaagatcaatggtgcttatttctgtgaagggcgagttcgaggagaggcaatcaggatacgaaccatgaagatgcgtcaacaagcttccttcctaccagctactttaactatgactgtggacaagggagataacgtgaacatatctttcaaaaaggtattgattaaagaagaagatgcagtgatttacaaaaatggttccttcatccattcagtgccccggcatgaagtacctgatattctagaagtacacctgcctcatgctcagccccaggatgctggagtgtactcggccaggtatataggaggaaacctcttcacctcggccttcaccaggctgatagtccggagatgtgaagcccagaagtggggacctgaatgcaaccatctctgtactgcttgtatgaacaatggtgtctgccatgaagatactggagaatgcatttgccctcctgggtttatgggaaggacgtgtgagaaggcttgtgaactgcacacgtttggcagaacttgtaaagaaaggtgcagtggacaagagggatgcaagtcttatgtgttctgtctccctgacccctatgggtgttcctgtgccacaggctggaagggtctgcagtgcaatgaagcatgccaccctggtttttacgggccagattgtaagcttaggtgcagctgcaacaatggggagatgtgtgatcgcttccaaggatgtctctgctctccaggatggcaggggctccagtgtgagagagaaggtaaagcaaggcatacagaggatgaccccaaagatagtggatttgccagatcatatagaagtaaacagtggtaaatttaatcccatttgcaaagcttctggctggccgctacctactaatgaagaaatgaccctggtgaagccggatgggacagtgctccattagccatattcaccatccaccggatcctcccccctgactcaggagtttgggtctgcagtgtgaacacagtggctgggatggtggaaaagcccttcaacatttctgttaaagttcttccaaagcccctgaatgccccaaacgtgattgacactggacataactttgctgtcatcaacatcagctctgagccttactttggggatggaccaatcaaatccaagaagcttctatacaaacccgttaatcactatgaggcttggcaacatattcaag

SEQ ID NO: 142 - protein, 367 aa, Homo Sapiens
  SR007G02
MDSLASLVLCGVSLLLSGTVEGAMDLILINSLPLVSDAETSLTCIASGWRPHEPITIGRDFEALMNQHQDPLEVTQDVTREWAKKVVWKREKASKINGAYFCEGRVRGEAIRIRTMKMRQQASFLPATLTMTVDKGDNVNISFKKVLIKEEDAVIYKNGSFIHSVPRHEVPDILEVHLPHAQPQDAGVYSARYIGGNLFTSAFTRLIVRRCEAQKWGPECNHLCTACMNNGVCHEDTGECICPPGFMGRTCEKACELHTFGRTCKERCSGQEGCKSYVFCLPDPYGCSCATGWKGLQCNEACHPGFYGPDCKLRCSCNNGEMCDRFQGCLCSPGWQGLQCEREGKARHTEDDPKDSGFARSYRSKQW

SEQ ID NO: 143 - DNA, 1467 bp, Homo Sapiens
  CDS (41)...(1447): SR007H03
tgcacatttgtggaaactggatggagagatttggggaagcatggactctttagccagcttagttctctgtggagtcagcttgctcctttctggaactgtggaaggtgccatggacttgatcttgatcaattccctacctcttgtatctgatgctgaaacatctctcacctgcattgcctctgggtggcgcccccatgagcccatcaccataggaagggactttgaagccttaatgaaccagcaccaggatccgctggaagttactcaagatgtgaccagagaatgggctaaaaaagttgtttggaagagagaaaaggctagtaagatcaatggtgcttatttctgtgaagggcgagttcgaggagaggcaatcaggatacgaaccatgaagatgcgtcaacaagcttccttcctaccagctactttaactatgactgtggacaagggagataacgtgaacatatctttcaaaaaggtattgattaaagaagaagatgcagtgatttacaaaaatggttccttcatccattcagtgccccggcatgaagtacctgatattctagaagtacacctgcctcatgctcagccccaggatgctggagtgtactcggccaggtatataggaggaaacctcttcacctcggccttcaccaggctgatagtccggagatgtgaagcccagaagtggggacctgaatgcaaccatctctgtactgcttgtatgaacaatggtgtctgccatgaagatactggagaatgcatttgccctcctgggtttatgggaaggacgtgtgagaaggcttgtgaactgcacacgtttggcagaacttgtaaagaaaggtgcagtggacaagagggatgcaagtcttatgtgttctgtctccctgacccctatgggtgttcctgtgccacaggctggaagggtctgcagtgcaatgaaggcatacagaggatgaccccaaagatagtggatttgccagatcatatagaagtaaacagtggtaaatttaatcccatttgcaaagcttctggctggccgctacctactaatgaagaaatgaccctggtgaagccggatgggacagtgctccatccaaaagactttaaccatacggatcatttctcagtagccatattcaccatccaccggatcctcccccctgactcaggagtttgggtctgcagtgtgaacacagtggctgggatggtggaaaagcccttcaacatttctgttaaagttcttccaaagcccctgaatgccccaaacgtgattgacactggacataactttgctgtcatcaacatcagctctgagccttactttggggatggaccaatcaaatccaagaagcttctatacaaacccgttaatcactatgaggcttggcaacatattcaagtatccatggagaaacagaggctgactaaagcaaatagtgacaaatgagattgttacactcaactatt

SEQ ID NO: 144 - protein, 468 aa, Homo Sapiens
  SR007H03
MDSLASLVLCGVSLLLSGTVEGAMDLILINSLPLVSDAETSLTCIASGWRPHEPITIGRDFEALMNQHQDPLEVTQDVTREWAKKVVWKREKASKINGAYFCEGRVRGEAIRIRTMKMRQQASFLPATLTMTVDKGDNVNISFKKVLIKEEDAVIYKNGSFIHSVPRHEVPDILEVHLPHAQPQDAGVYSARYIGGNLFTSAFTRLIVRRCEAQKWGPECNHLCTACMNNGVCHEDTGECICPPGFMGRTCEKACELHTFGRTCKERCSGQEGCKSYVFCLPDPYGCSCATGWKGLQCNEGIQRMTPKIVDLPDHIEVNSGKFNPICKASGWPLPTNEEMTLVKPDGTVLHPKDFNHTDHFSVAIFTIHRILPPDSGVWVCSVNTVAGMVEKPFNISVKVLPKPLNAPNVIDTGHNFAVINISSEPYFGDGPIKSKKLLYKPVNHYEAWQHIQVSMEKQRLTKANSDK

SEQ ID NO: 145 - protein, 864 aa, Homo sapiens
  TEKc
MDSLASLVLCGVSLLLSGTVEGAMDLILINSLPLVSDAETSLTCIASGWRPHEPITIGRDFEALMNQHQDPLEVTQDVTREWAKKVVWKREKASKINGAYFCEGRVRGEAIRIRTMKMRQQASFLPATLTMTVDKGDNVNISFKKVLIKEEDAVIYKNGSFIHSVPRHEVPDILEVHLPHAQPQDAGVYSARYIGGNLFTSAFTRLIVRRCEAQKWGPECNHLCTACMNNGVCHEDTGECICPPGFMGRTCEKACELHTFGRTCKERCSGQEGCKSYVFCLPDPYGCSCATGWKGLQCNEACHPGFYGPDCKLRCSCNNGEMCDRFQGCLCSPGWQGLQCEREGIQRMTPKIVDLPDHIEVNSGKFNPICKASGWPLPTNEEMTLVKPDGTVLHPKDFNHTDHFSVAIFTIHRILPPDSGVWVCSVNTVAGMVEKPFNISVKVLPKPLNAPNVIDTGHNFAVINISSEPYFGDGPIKSKKLLYKPVNHYEAWQHIQVTNEIVTLNYLEPRTEYELCVQLVRRGEGGEGHPGPVRRFTTASIGLPPPRGLNLLPKSQTTLNLTWQPSSEDDFYVEVERRSVQKSDQQNIKVPGNLTSVLLNNLHPREQYVVRARVNTKAQGEWSEDLTAWTLSDILPPQPENIKISNITHSSAVISWTILDGYSISSITIRYKVQGKNEDQHVDVKIKNATITQYQLKGLEPETAYQVDIFAENNIGSSNPAFSHELVTLPESQAPADLGGGKMLLIAILGSAGMTCLTVLLAFLIILQLKRANVQRRMAQAFQNVREEPAVQFNSGTLALNRKVKNNPDPTIYPVLDWNDIKFQDVIGEGNFGQVLKARIKKDGLRMDAAIKRMKEYASKDDHR

SEQ ID NO: 146 - protein, 798 aa, Homo sapiens
  TEKc 31
MDLILINSLPLVSDAETSLTCIASGWRPHEPITIGRDFEALMNQHQDPLEVTQDVTREWAKKVVWKREKASKINGAYFCEGRVRGEAIRIRTMKMRQQASFLPATLTMTVDKGDNVNISFKKVLIKEEDAVIYKNGSFIHSVPRHEVPDILEVHLPHAQPQDAGVYSARYIGGNLFTSAFTRLIVRRCEAQKWGPECNHLCTACMNNGVCHEDTGECICPPGFMGRTCEKACELHTFGRTCKERCSGQEGCKSYVFCLPDPYGCSCATGWKGLQCNEGIQRMTPKIVDLPDHIEVNSGKFNPICKASGWPLPTNEEMTLVKPDGTVLHPKDFNHTDHFSVAIFTIHRILPPDSGVWVCSVNTVAGMVEKPFNISVKVLPKPLNAPNVIDTGHNFAVINISSEPYFGDGPIKSKKLLYKPVNHYEAWQHIQVTNEIVTLNYLEPRTEYELCVQLVRRGEGGEGHPGPVRRFTTASIGLPPPRGLNLLPKSQTTLNLTWQPSSEDDFYVEVERRSVQKSDQQNIKVPGNLTSVLLNNLHPREQYVVRARVNTKAQGEWSEDLTAWTLSDILPPQPENIKISNITHSSAVISWTILDGYSISSITIRYKVQGKNEDQHVDVKIKNATITQYQLKGLEPETAYQVDIFAENNIGSSNPAFSHELVTLPESQAPADLGGGKMLLIAILGSAGMTCLTVLLAFLIILQLKRANVQRRMAQAFQNVREEPAVQFNSGTLALNRKVKNNPDPTIYPVLDWNDIKFQDVIGEGNFGQVLKARIKKDGLRMDAAIKRMKEYASKDDHR

SEQ ID NO: 147 - protein, 821 aa, Homo sapiens
  TEKc 34
MDSLASLVLCGVSLLLSGTVEGAMDLILINSLPLVSDAETSLTCIASGWRPHEPITIGRDFEALMNQHQDPLEVTQDVTREWAKKVVWKREKASKINGAYFCEGRVRGEAIRIRTMKMRQQASFLPATLTMTVDKGDNVNISFKKVLIKEEDAVIYKNGSFIHSVPRHEVPDILEVHLPHAQPQDAGVYSARYIGGNLFTSAFTRLIVRRCEAQKWGPECNHLCTACMNNGVCHEDTGECICPPGFMGRTCEKACELHTFGRTCKERCSGQEGCKSYVFCLPDPYGCSCATGWKGLQCNEGIQRMTPKIVDLPDHIEVNSGKFNPICKASGWPLPTNEEMTLVKPDGTVLHPKDFNHTDHFSVAIFTIHRILPPDSGVWVCSVNTVAGMVEKPFNISVKVLPKPLNAPNVIDTGHNFAVINISSEPYFGDGPIKSKKLLYKPVNHYEAWQHIQVTNEIVTLNYLEPRTEYELCVQLVRRGEGGEGHPGPVRRFTTASIGLPPPRGLNLLPKSQTTLNLTWQPSSEDDFYVEVERRSVQKSDQQNIKVPGNLTSVLLNNLHPREQYVVRARVNTKAQGEWSEDLTAWTLSDILPPQPENIKISNITHSSAVISWTILDGYSISSITIRYKVQGKNEDQHVDVKIKNATITQYQLKGLEPETAYQVDIFAENNIGSSNPAFSHELVTLPESQAPADLGGGKMLLIAILGSAGMTCLTVLLAFLIILQLKRANVQRRMAQAFQNVREEPAVQFNSGTLALNRKVKNNPDPTIYPVLDWNDIKFQDVIGEGNFGQVLKARIKKDGLRMDAAIKRMKEYASKDDHR

SEQ ID NO: 148 - protein, 786 aa, Homo sapiens
  TIE isoform
MVWRVPPFLLPILFLASHVGAAVDLTLLANLRLTDPQRFFLTCVSGEAGAGRGSDAWGPPLLLEKDDRIVRTPPGPPLRLARNGSHQVTLRGFSKPSDLVGVFSCVGGAGARRTRVIYVHNSPGAHLLPDKVTHTVNKGDTAVLSARVHKEKQTDVIWKSNGSYFYTLDWHEAQDGRFLLQLPNVQPPSSGIYSATYLEASPLGSAFFRLIVRGCGAGRWGPGCTKECPGCLHGGVCHDHDGECVCPPGFTGTRCEQACREGRFGQSCQEQCPGISGCRGLTFCLPDPYGCSCGSGWRGSQCQEACAPGHFGADCRLQCQCQNGGTCDRFSGCVCPSGWHGVHCEKSDRIPQILNMASELEFNLETMPRINCAAAGNPFPVRGSIELRKPDGTVLLSTKAIVEPEKTTAEFEVPRLVLADSGFWECRVSTSGGQDSRRFKVNVKVPPVPLAAPRLLTKQSRQLVVSPLVSFSGDGPISTVRLHYRPQDSTMDWSTIVVDPSENVTLMNLRPKTGYSVRVQLSRPGEGGEGAWGPPTLMTTDCPEPLLQPWLEGWHVEGTDRLRVSWSLPLVPGPLVGDGFLLRLWDGTRGQERRENVSSPQARTALLTGLTPGTHYQLDVQLYHCTLLGPASPPAHVLLPPSGPPAPRHLHAQALSDSEIQLTWKHPEALPGPISKYVVEVQVAGGAGDPLWIDVDRPEETSTIIRGLNASTRYLFRMRASIQGLGDWSNTVEESTLGNGLQAEGPVQESRAAEEGLDQQLILAVVGSVSATCLTILAALLTLVCI

SEQ ID NO: 149 - DNA, 934 bp, Homo Sapiens
  CDS (17)...(772): SR006A04
ggtcggcctctggagtatggtctggcgggtgccccctttcttgctccccatcctcttcttggcttctcatgtgggcgcggcggtggacctgacgctgctggccaacctgcggctcacggacccccagcgcttcttcctgacttgcgtgtctggggaggccggggcggggaggggctcggacgcctggggcccgcccctgctgctggagaaggacgaccgtatcgtgcgcaccccgcccgggccacccctgcgcctggcgcgcaacggttcgcaccaggtcacgcttcgcggcttctccaagccctcggacctcgtgggcgtcttctcctgcgtgggcggtgctggggcgcggcgcacgcgcgtcatctacgtgcacaacagccctggagcccacctgcttccagacaaggtcacacacactgtgaacaaaggtgacaccgctgtactttctgcacgtgtgcacaaggagaagcagacagacgtgatctggaagagcaacggatcctacttctacaccctggactggcatgaagcccaggatgggcggttcctgctgcagctcccaaatgtgcagccaccatcgagcggcatctacagtgccacttacctggaagccagccccctgggcagcgccttctttcggctcatcgtgcggggtcagaggcagagggcagaggttgtgggtagggtgggaggctgggagccctatgggtacttcctgtgggtcccctggagcccctggatctccagtcctcagtggtcaggtgggtgagggtcagctgctgaagacaccttcctccaggttgtggggctgggcgctgggggccaggctgtaccaaggagtgcccaggttgcctacatggaggtgtctgccacgaccatgacggcgaatgtgtatgcccccctggcttcactggcacccgctgtgaacagg

SEQ ID NO: 150 - protein, 251 aa, Homo Sapiens
  SR006A04
MVWRVPPFLLPILFLASHVGAAVDLTLLANLRLTDPQRFFLTCVSGEAGAGRGSDAWGPPLLLEKDDRIVRTPPGPPLRLARNGSHQVTLRGFSKPSDLVGVFSCVGGAGARRTRVIYVHNSPGAHLLPDKVTHTVNKGDTAVLSARVHKEKQTDVIWKSNGSYFYTLDWHEAQDGRFLLQLPNVQPPSSGIYSATYLEASPLGSAFFRLIVRGQRQRAEVVGRVGGWEPYGYFLWVPWSPWISSPQWSGG

SEQ ID NO: 151 - DNA, 1619 bp, Homo Sapiens
  CDS (14)...(1153): SR006B07
cggcctctggagtatggtctggcgggtgccccctttcttgctccccatcctcttcttggcttctcatgtgggcgcggcggtggacctgacgctgctggccaacctgcggctcacggacccccagcgcttcttcctgacttgcgtgtctggggaggccggggcggggaggggctcggacgcctggggcccgcccctgctgctggagaaggacgaccgtatcgtgcgcaccccgcccgggccacccctgcgcctggcgcgcaacggttcgcaccaggtcacgcttcgcggcttctccaagccctcggacctcgtgggcgtcttctcctgcgtgggcggtgctggggcgcggcgcacgcgcgtcatctacgtgcacaacagccctggagcccacctgcttccagacaaggtcacacacactgtgaacaaaggtgacaccgctgtactttctgcacgtgtgcacaaggagaagcagacagacgtgatctggaagagcaacggatcctacttctacaccctggactggcatgaagcccaggatgggcggttcctgctgcagctcccaaatgtgcagccaccatcgagcggcatctacagtgccacttacctggaagccagccccctgggcagcgccttctttcggctcatcgtgcggggttgtggggctgggcgctgggggccaggctgtaccaaggagtgcccaggttgcctacatggaggtgtctgccacgaccatgacggcgaatgtgtatgcccccctggcttcactggcacccgctgtgaacaggcctgcagagagggccgttttgggcagagctgccaggagcagtgcccaggcatatcaggctgccggggcctcaccttctgcctcccagacccctatggctgctcttgtggatctggctggagaggaagccagtgccaagaagcttgtgcccctggtcattttggggctgattgccgactccagtgccagtgtcagaatggtggcacttgtgaccggttcagtggttgtgtctgcccctctgggtggcatggagtgcactgtgagaagtcaggctggagggactgggtagatacctccactgagaaacagaacacggatgaggggcgctttggtggtcacgtgtctgcccctgtgggagctccaggatgagtgtcctttctccccagaccggatcccccagatcctcaacatggcctcagaactggagttcaacttagagacgatgccccggatcaactgtgcagctgcagggaaccccttccccgtgcggggcagcatagagctacgcaagccagacggcactgtgctcctgtccaccaaggccattgtggagccagagaagaccacagctgagttcgaggtgccccgcttggttcttgcggacagtgggttctgggagtgccgtgtgtccacatctggcggccaagacagccggcgcttcaaggtcaatgtgaaagtgccccccgtgcccctggctgcacctcggctcctgaccaagcagagccgccagcttgtggtctccccgctggtctcgttctctggggatggacccatctccactgtccgcctgcactaccggccccaggacagtaccatggactggtcgaccattgtg

SEQ ID NO: 152 - protein, 379 aa, Homo Sapiens
  SR006B07
MVWRVPPFLLPILFLASHVGAAVDLTLLANLRLTDPQRFFLTCVSGEAGAGRGSDAWGPPLLLEKDDRIVRTPPGPPLRLARNGSHQVTLRGFSKPSDLVGVFSCVGGAGARRTRVIYVHNSPGAHLLPDKVTHTVNKGDTAVLSARVHKEKQTDVIWKSNGSYFYTLDWHEAQDGRFLLQLPNVQPPSSGIYSATYLEASPLGSAFFRLIVRGCGAGRWGPGCTKECPGCLHGGVCHDHDGECVCPPGFTGTRCEQACREGRFGQSCQEQCPGISGCRGLTFCLPDPYGCSCGSGWRGSQCQEACAPGHFGADCRLQCQCQNGGTCDRFSGCVCPSGWHGVHCEKSGWRDWVDTSTEKQNTDEGRFGGHVSAPVGAPG

SEQ ID NO: 153 - DNA, 740 bp, Homo Sapiens
  CDS (34)...(519): SR006B06
tcgtcctggctggcctgggtcggcctctggagtatggtctggcgggtgccccctttcttgctccccatcctcttcttggcttctcatgtgggcgcggcggtggacctgacgctgctggccaacctgcggctcacggacccccagcgcttcttcctgacttgcgtgtctggggaggccggggcggggaggggctcggacgcctggggcccgcccctgctgctggagaaggacgaccgtatcgtgcgcaccccgcccgggccacccctgcgcctggcgcgcaacggttcgcaccaggtcacgcttcgcggcttctccaagccctcggacctcgtgggcgtcttctcctgcgtgggcggtgctggggcgcggcgcacgcgcgtcatctacgtgcacaacagccctggaggtgagttaggcaggcggggggatggcgcggggaaaaccaggccgctgacccaccttccaccccgcagcccacctgcttccagacaaggtcacacacactgtgaacaaaggtgacaccgctgtactttctgcacgtgtgcacaaggagaagcagacagacgtgatctggaagagcaacggatcctacttctacaccctggactggcatgaagcccaggatgggcggttcctgctgcagctcccaaatgtgcagccaccatcgagcggcatctacagtgccacttacctggaagccagccccctgggcagcgccttctttcggctcatcgtgcggg

SEQ ID NO: 154 - protein, 161 aa, Homo Sapiens
  SR006B06
MVWRVPPFLLPILFLASHVGAAVDLTLLANLRLTDPQRFFLTCVSGEAGAGRGSDAWGPPLLLEKDDRIVRTPPGPPLRLARNGSHQVTLRGFSKPSDLVGVFSCVGGAGARRTRVIYVHNSPGGELGRRGDGAGKTRPLTHLPPRSPPASRQGHTHCEQR

SEQ ID NO: 155 - DNA, 1761 bp, Homo Sapiens
  CDS (14)...(1258): SR006B12
cggcctctggagtatggtctggcgggtgccccctttcttgctccccatcctcttcttggcttctcatgtgggcgcggcggtggacctgacgctgctggccaacctgcggctcacggacccccagcgcttcttcctgacttgcgtgtctggggaggccggggcggggaggggctcggacgcctggggcccgcccctgctgctggagaaggacgaccgtatcgtgcgcaccccgcccgggccacccctgcgcctggcgcgcaacggttcgcaccaggtcacgcttcgcggcttctccaagccctcggacctcgtgggcgtcttctcctgcgtgggcggtgctggggcgcggcgcacgcgcgtcatctacgtgcacaacagccctggagcccacctgcttccagacaaggtcacacacactgtgaacaaaggtgacaccgctgtactttctgcacgtgtgcacaaggagaagcagacagacgtgatctggaagagcaacggatcctacttctacaccctggactggcatgaagcccaggatgggcggttcctgctgcagctcccaaatgtgcagccaccatcgagcggcatctacagtgccacttacctggaagccagccccctgggcagcgccttctttcggctcatcgtgcggggttgtggggctgggcgctgggggccaggctgtaccaaggagtgcccaggttgcctacatggaggtgtctgccacgaccatgacggcgaatgtgtatgcccccctggcttcactggcacccgctgtgaacaggcctgcagagagggccgttttgggcagagctgccaggagcagtgcccaggcatatcaggctgccggggcctcaccttctgcctcccagacccctatggctgctcttgtggatctggctggagaggaagccagtgccaagaagcttgtgcccctggtcattttggggctgattgccgactccagtgccagtgtcagaatggtggcacttgtgaccggttcagtggttgtgtctgcccctctgggtggcatggagtgcactgtgagaagtcagaccggatcccccagatcctcaacatggcctcagaactggagttcaacttagagacgatgccccggatcaactgtgcagctgcagggaaccccttccccgtgcggggcagcatagagctacgcaagccagacggcactgtgctcctggtcagcccccaatcaccccaacccaccagcccctcaggccgcctgcttcacagctgatccctaagaccccctagtccctcagaactttctgcagggcccacccattggcctgaccattgctcacatgaggtcaggctgattggtgagggggctgccactgggcctctgtcctgccatcagtccagacggacacctgggtgcctgccacagaggtgcccgttccctgtgacctgtccccttcccccatctcttttagtccaccaaggccattgtggagccagagaagaccacagctgagttcgaggtgccccgcttggttcttgcggacagtgggttctgggagtgccgtgtgtccacatctggcggccaagacagccggcgcttcaaggtcaatgtgaaagtgccccccgtgcccctggctgcacctcggctcctgaccaagcagagccgccagcttgtggtctccccgctggtctcgttctctggggatggacccatctccactgtccgcctgcactaccggccccaggacagtaccatggactggtcgaccattgtgg

SEQ ID NO: 156 - protein, 414 aa, Homo Sapiens
  SR006B12
MVWRVPPFLLPILFLASHVGAAVDLTLLANLRLTDPQRFFLTCVSGEAGAGRGSDAWGPPLLLEKDDRIVRTPPGPPLRLARNGSHQVTLRGFSKPSDLVGVFSCVGGAGARRTRVIYVHNSPGAHLLPDKVTHTVNKGDTAVLSARVHKEKQTDVIWKSNGSYFYTLDWHEAQDGRFLLQLPNVQPPSSGIYSATYLEASPLGSAFFRLIVRGCGAGRWGPGCTKECPGCLHGGVCHDHDGECVCPPGFTGTRCEQACREGRFGQSCQEQCPGISGCRGLTFCLPDPYGCSCGSGWRGSQCQEACAPGHFGADCRLQCQCQNGGTCDRFSGCVCPSGWHGVHCEKSDRIPQILNMASELEFNLETMPRINCAAAGNPFPVRGSIELRKPDGTVLLVSPQSPQPTSPSGRLLHS

SEQ ID NO: 157 - DNA, 1230 bp, Homo Sapiens
  CDS (14)...(967): SR006B10
cggcctctggagtatggtctggcgggtgccccctttcttgctccccatcctcttcttggcttctcatgtgggcgcggcggtggacctgacgctgctggccaacctgcggctcacggacccccagcgcttcttcctgacttgcgtgtctggggaggccggggcggggaggggctcggacgcctggggcccgcccctgctgctggagaaggacgaccgtatcgtgcgcaccccgcccgggccacccctgcgcctggcgcgcaacggttcgcaccaggtcacgcttcgcggcttctccaagccctcggacctcgtgggcgtcttctcctgcgtgggcggtgctggggcgcggcgcacgcgcgtcatctacgtgcacaacagccctggagcccacctgcttccagacaaggtcacacacactgtgaacaaaggtgacaccgctgtactttctgcacgtgtgcacaaggagaagcagacagacgtgatctggaagagcaacggatcctacttctacaccctggactggcatgaagcccaggatgggcggttcctgctgcagctcccaaatgtgcagccaccatcgagcggcatctacagtgccacttacctggaagccagccccctgggcagcgccttctttcggctcatcgtgcggggttgtggggctgggcgctgggggccaggctgtaccaaggagtgcccaggttgcctacatggaggtgtctgccacgaccatgacggcgaatgtgtatgcccccctggcttcactggcacccgctgtgaacaggcctgcagagagggccgttttgggcagagctgccaggagcagtgcccaggcatatcaggctgccggggcctcaccttctgcctcccagacccctatggctgctcttgtggatctggctggagaggaagccagtgccaagaagtccaccaaggccattgtggagccagagaagaccacagctgagttcgaggtgccccgcttggttcttgcggacagtgggttctgggagtgccgtgtgtccacatctggcggccaagacagccggcgcttcaaggtcaatgtgaaagtgccccccgtgcccctggctgcacctcggctcctgaccaagcagagccgccagcttgtggtctccccgctggtctcgttctctggggatggacccatctccactgtccgcctgcactaccggccccaggacagtaccatggactggtcgaccattgtgg

SEQ ID NO: 158 - protein, 317 aa, Homo Sapiens
  SR006B10
MVWRVPPFLLPILFLASHVGAAVDLTLLANLRLTDPQRFFLTCVSGEAGAGRGSDAWGPPLLLEKDDRIVRTPPGPPLRLARNGSHQVTLRGFSKPSDLVGVFSCVGGAGARRTRVIYVHNSPGAHLLPDKVTHTVNKGDTAVLSARVHKEKQTDVIWKSNGSYFYTLDWHEAQDGRFLLQLPNVQPPSSGIYSATYLEASPLGSAFFRLIVRGCGAGRWGPGCTKECPGCLHGGVCHDHDGECVCPPGFTGTRCEQACREGRFGQSCQEQCPGISGCRGLTFCLPDPYGCSCGSGWRGSQCQEVHQGHCGAREDHS

SEQ ID NO: 159 - DNA, 2273 bp, Homo Sapiens
  SR016G03
ctctggagtatggtctggcgggtgccccctttcttgctccccatcctcttcttggcttctcatgtgggcgcggcggtggacctgacgctgctggccaacctgcggctcacggacccccagcgcttcttcctgacttgcgtgtctggggaggccggggcggggaggggctcggacgcctggggcccgcccctgctgctggagaaggacgaccgtatcgtgcgcaccccgcccgggccacccctgcgcctggcgcgcaacggttcgcaccaggtcacgcttcgcggcttctccaagccctcggacctcgtgggcgtcttctcctgcgtgggcggtgctggggcgcggcgcacgcgcgtcatctacgtgcacaacagccctggagcccacctgcttccagacaaggtcacacacactgtgaacaaaggtgacaccgctgtactttctgcacgtgtgcacaaggagaagcagacagacgtgatctggaagagcaacggatcctacttctacaccctggactggcatgaagcccaggatgggcggttcctgctgcagctcccaaatgtgcagccaccatcgagcggcatctacagtgccacttacctggaagccagccccctgggcagcgccttctttcggctcatcgtgcggggttgtggggctgggcgctgggggccaggctgtaccaaggagtgcccaggttgcctacatggaggtgtctgccacgaccatgacggcgaatgtgtatgcccccctggcttcactggcacccgctgtgaacaggcctgcagagagggccgttttgggcagagctgccaggagcagtgcccaggcatatcaggctgccggggcctcaccttctgcctcccagacccctatggctgctcttgtggatctggctggagaggaagccagtgccaagaagcttgtgcccctggtcattttggggctgattgccgactccagtgccagtgtcagaatggtggcacttgtgaccggttcagtggttgtgtctgcccctctgggtggcatggagtgcactgtgagaagtcagaccggatcccccagatcctcaacatggcctcagaactggagttcaacttagagacgatgccccggatcaactgtgcagctgcagggaaccccttccccgtgcggggcagcatagagctacgcaagccagacggcactgtgctcctgtccaccaaggccattgtggagccagagaagaccacagctgagttcgaggtgccccgcttggttcttgcggacagtgggttctgggagtgccgtgtgtccacatctggcggccaagacagccggcgcttcaaggtcaatgtgaaagtgccccccgtgcccctggctgcacctcggctcctgaccaagcagagccgccagcttgtggtctccccgctggtctcgttctctggggatggacccatctccactgtccgcctgcactaccggccccaggacagtaccatggactggtcgaccattgtggtggaccccagtgagaacgtgacgttaatgaacctgaggccaaagacaggatacagtgttcgtgtgcagctgagccggccaggggaaggaggagagggggcctgggggcctcccaccctcatgaccacagactgtcctgagcctttgttgcagccgtggttggagggctggcatgtggaaggcactgaccggctgcgagtgagctggtccttgcccttggtgcccgggccactggtgggcgacggtttcctgctgcgcctgtgggacgggacacgggggcaggagcggcgggagaacgtctcatccccccaggcccgcactgccctcctgacgggactcacgcctggcacccactaccagctggatgtgcagctctaccactgcaccctcctgggcccggcctcgccccctgcacacgtgcttctgccccccagtgggcctccagccccccgacacctccacgcccaggccctctcagactccgagatccagctgacatggaagcacccggaggctctgcctgggccaatatccaagtacgttgtggaggtgcaggtggctgggggtgcaggagacccactgtggatagacgtggacaggcctgaggagacaagcaccatcatccgtggcctcaacgccagcacgcgctacctcttccgcatgcgggccagcattcaggggctcggggactggagcaacacagtagaagagtccaccctgggcaacggtgagagggcagggcccacaggaccccccgggctctgagcggggag

SEQ ID NO: 160 - protein, 751 aa, Homo Sapiens
  SR016G03
MVWRVPPFLLPILFLASHVGAAVDLTLLANLRLTDPQRFFLTCVSGEAGAGRGSDAWGPPLLLEKDDRIVRTPPGPPLRLARNGSHQVTLRGFSKPSDLVGVFSCVGGAGARRTRVIYVHNSPGAHLLPDKVTHTVNKGDTAVLSARVHKEKQTDVIWKSNGSYFYTLDWHEAQDGRFLLQLPNVQPPSSGIYSATYLEASPLGSAFFRLIVRGCGAGRWGPGCTKECPGCLHGGVCHDHDGECVCPPGFTGTRCEQACREGRFGQSCQEQCPGISGCRGLTFCLPDPYGCSCGSGWRGSQCQEACAPGHFGADCRLQCQCQNGGTCDRFSGCVCPSGWHGVHCEKSDRIPQILNMASELEFNLETMPRINCAAAGNPFPVRGSIELRKPDGTVLLSTKAIVEPEKTTAEFEVPRLVLADSGFWECRVSTSGGQDSRRFKVNVKVPPVPLAAPRLLTKQSRQLVVSPLVSFSGDGPISTVRLHYRPQDSTMDWSTIVVDPSENVTLMNLRPKTGYSVRVQLSRPGEGGEGAWGPPTLMTTDCPEPLLQPWLEGWHVEGTDRLRVSWSLPLVPGPLVGDGFLLRLWDGTRGQERRENVSSPQARTALLTGLTPGTHYQLDVQLYHCTLLGPASPPAHVLLPPSGPPAPRHLHAQALSDSEIQLTWKHPEALPGPISKYVVEVQVAGGAGDPLWIDVDRPEETSTIIRGLNASTRYLFRMRASIQGLGDWSNTVEESTLGNGERAGPTGPPGL

SEQ ID NO: 161 - protein, 838 aa, Artificial Sequence
  TIE.IFP
MVWRVPPFLLPILFLASHVGAAVDLTLLANLRLTDPQRFFLTCVSGEAGAGRGSDAWGPPLLLEKDDRIVRTPPGPPLRLARNGSHQVTLRGFSKPSDLVGVFSCVGGAGARRTRVIYVHNSPGAHLLPDKVTHTVNKGDTAVLSARVHKEKQTDVIWKSNGSYFYTLDWHEAQDGRFLLQLPNVQPPSSGIYSATYLEASPLGSAFFRLIVRGCGAGRWGPGCTKECPGCLHGGVCHDHDGECVCPPGFTGTRCEQACREGRFGQSCQEQCPGISGCRGLTFCLPDPYGCSCGSGWRGSQCQEACAPGHFGADCRLQCQCQNGGTCDRFSGCVCPSGWHGVHCEKSDRIPQILNMASELEFNLETMPRINCAAAGNPFPVRGSIELRKPDGTVLLSTKAIVEPEKTTAEFEVPRLVLADSGFWECRVSTSGGQDSRRFKVNVKVPPVPLAAPRLLTKQSRQLVVSPLVSFSGDGPISTVRLHYRPQDSTMDWSTIVVDPSENVTLMNLRPKTGYSVRVQLSRPGEGGEGAWGPPTLMTTDCPEPLLQPWLEGWHVEGTDRLRVSWSLPLVPGPLVGDGFLLRLWDGTRGQERRENVSSPQARTALLTGLTPGTHYQLDVQLYHCTLLGPASPPAHVLLPPSGPPAPRHLHAQALSDSEIQLTWKHPEALPGPISKYVVEVQVAGGAGDPLWIDVDRPEETSTIIRGLNASTRYLFRMRASIQGLGDWSNTVEESTLGNGLQAEGPVQESRAAEEGLDQQLILAVVGSVSATCLTILAALLTLVCIRRSCLHRRRTFTYQSGSGEETILQFSSGTLTLTRRPKLQPEPLSYPVLEWED

SEQ ID NO: 162 - protein, 632 aa, Artificial Sequence
  TIE.IFP
MVWRVPPFLLPILFLASHVGAAVDLTLLANLRLTDPQRFFLTCVSGEAGAGRGSDAWGPPLLLEKDDRIVRTPPGPPLRLARNGSHQVTLRGFSKPSDLVGVFSCVGGAGARRTRVIYVHNSPGAHLLPDKVTHTVNKGDTAVLSARVHKEKQTDVIWKSNGSYFYTLDWHEAQDGRFLLQLPNVQPPSSGIYSATYLEASPLGSAFFRLIVRGCGAGRWGPGCTKECPGCLHGGVCHDHDGECVCPPGFTGTRCEQACREGRFGQSCQEQCPGISGCRGLTFCLPDPYGCSCGSGWRGSQCQEACAPGHFGADCRLQCQCQNGGTCDRFSGCVCPSGWHGVHCEKSDRIPQILNMASELEFNLETMPRINCAAAGNPFPVRGSIELRKPDGTVLLSTKAIVEPEKTTAEFEVPRLVLADSGFWECRVSTSGGQDSRRFKVNVKVPPVPLAAPRLLTKQSRQLVVSPLVSFSGDGPISTVRLHYRPQDSTMDWSTIVVDPSENVTLMNLRPKTGYSVRVQLSRPGEGGEGAWGPPTLMTTDCPEPLLQPWLEGWHVEGTDRLRVSWSLPLVPGPLVGDGFLLRLWDGTRGQERRENVSSPQARTALLTGLTPGTHYQLDVQLYHCTLLGPAS

SEQ ID NO: 163 - protein, 533 aa, Artificial Sequence
  TIE.IFP
MVWRVPPFLLPILFLASHVGAAVDLTLLANLRLTDPQRFFLTCVSGEAGAGRGSDAWGPPLLLEKDDRIVRTPPGPPLRLARNGSHQVTLRGFSKPSDLVGVFSCVGGAGARRTRVIYVHNSPGAHLLPDKVTHTVNKGDTAVLSARVHKEKQTDVIWKSNGSYFYTLDWHEAQDGRFLLQLPNVQPPSSGIYSATYLEASPLGSAFFRLIVRGCGAGRWGPGCTKECPGCLHGGVCHDHDGECVCPPGFTGTRCEQACREGRFGQSCQEQCPGISGCRGLTFCLPDPYGCSCGSGWRGSQCQEACAPGHFGADCRLQCQCQNGGTCDRFSGCVCPSGWHGVHCEKSDRIPQILNMASELEFNLETMPRINCAAAGNPFPVRGSIELRKPDGTVLLSTKAIVEPEKTTAEFEVPRLVLADSGFWECRVSTSGGQDSRRFKVNVKVPPVPLAAPRLLTKQSRQLVVSPLVSFSGDGPISTVRLHYRPQDSTMDWSTIVVDPSENVTLMNLRPKTGYSVRVQLSRPGEGGEGAWG

SEQ ID NO: 164 - protein, 428 aa, Artificial Sequence
  TIE.IFP
MVWRVPPFLLPILFLASHVGAAVDLTLLANLRLTDPQRFFLTCVSGEAGAGRGSDAWGPPLLLEKDDRIVRTPPGPPLRLARNGSHQVTLRGFSKPSDLVGVFSCVGGAGARRTRVIYVHNSPGAHLLPDKVTHTVNKGDTAVLSARVHKEKQTDVIWKSNGSYFYTLDWHEAQDGRFLLQLPNVQPPSSGIYSATYLEASPLGSAFFRLIVRGCGAGRWGPGCTKECPGCLHGGVCHDHDGECVCPPGFTGTRCEQACREGRFGQSCQEQCPGISGCRGLTFCLPDPYGCSCGSGWRGSQCQEACAPGHFGADCRLQCQCQNGGTCDRFSGCVCPSGWHGVHCEKSDRIPQILNMASELEFNLETMPRINCAAAGNPFPVRGSIELRKPDGTVLLSTKAIVEPEKTTAEFEVPRLVLADSGFWECRV

SEQ ID NO: 165 - protein, 344 aa, Artificial Sequence
  TIE.IFP
MVWRVPPFLLPILFLASHVGAAVDLTLLANLRLTDPQRFFLTCVSGEAGAGRGSDAWGPPLLLEKDDRIVRTPPGPPLRLARNGSHQVTLRGFSKPSDLVGVFSCVGGAGARRTRVIYVHNSPGAHLLPDKVTHTVNKGDTAVLSARVHKEKQTDVIWKSNGSYFYTLDWHEAQDGRFLLQLPNVQPPSSGIYSATYLEASPLGSAFFRLIVRGCGAGRWGPGCTKECPGCLHGGVCHDHDGECVCPPGFTGTRCEQACREGRFGQSCQEQCPGISGCRGLTFCLPDPYGCSCGSGWRGSQCQEACAPGHFGADCRLQCQCQNGGTCDRFSGCVCPSGWHGVHC

SEQ ID NO: 166 - protein, 255 aa, Artificial Sequence
  TIE.IFP
MVWRVPPFLLPILFLASHVGAAVDLTLLANLRLTDPQRFFLTCVSGEAGAGRGSDAWGPPLLLEKDDRIVRTPPGPPLRLARNGSHQVTLRGFSKPSDLVGVFSCVGGAGARRTRVIYVHNSPGAHLLPDKVTHTVNKGDTAVLSARVHKEKQTDVIWKSNGSYFYTLDWHEAQDGRFLLQLPNVQPPSSGIYSATYLEASPLGSAFFRLIVRGCGAGRWGPGCTKECPGCLHGGVCHDHDGECVCPPGFTGTRC

SEQ ID NO: 167 - protein, 197 aa, Artificial Sequence
  TIE.IFP
MVWRVPPFLLPILFLASHVGAAVDLTLLANLRLTDPQRFFLTCVSGEAGAGRGSDAWGPPLLLEKDDRIVRTPPGPPLRLARNGSHQVTLRGFSKPSDLVGVFSCVGGAGARRTRVIYVHNSPGAHLLPDKVTHTVNKGDTAVLSARVHKEKQTDVIWKSNGSYFYTLDWHEAQDGRFLLQLPNVQPPSSGIYSATY

SEQ ID NO: 168 - DNA, 913 bp, Homo sapiens
  SR003H02
agaaggcgctgggctgcgagggcgcgagggcgcgagggcagggggcaaccggaccccgcccgcacccatggcgcccgtcgccgtctgggccgcgctggccgtcggactggagctctgggctgcggcgcacgccttgcccgcccaggtggcatttacaccctacgccccggagcccgggagcacatgccggctcagagaatactatgaccagacagctcagatgtgctgcagcaaatgctcgccgggccaacatgcaaaagtcttctgtaccaagacctcggacaccgtgtgtgactcctgtgaggacagcacatacacccagctctggaactgggttcccgagtgcttgagctgtggctcccgctgtagctctgaccaggtggaaactcaagcctgcactcgggaacagaaccgcatctgcacctgcaggcccggctggtactgcgcgctgagcaagcaggaggggtgccggctgtgcgcgccgctgcgcaagtgccgcccgggcttcggcgtggccagaccagacctctcctagggctctagtgccaaggcccagctgtcccgcagagtgtctgagtggttgacaagttcggattgttccctgaaggaactgaaacatcagacgtggtgtgcaagccctgtgccccggggacgttctccaacacgacttcatccacggatatttgcaggccccaccagatctgtaacgtggtggccatccctgggaatgcaagcatggatgcagtctgcacgtccacgtcccccacccggagtatggccccaggggcagtacacttaccccagccagtgtccacacgatcccaacacacgcagccaactccagaacccagcactgctccaagcacctccttcctgctcccaatgggccccagccccccagctgaagggagca

SEQ ID NO: 169 - protein, 155 aa, Homo sapiens
  SR003H02
MAPVAVWAALAVGLELWAAAHALPAQVAFTPYAPEPGSTCRLREYYDQTAQMCCSKCSPGQHAKVFCTKTSDTVCDSCEDSTYTQLWNWVPECLSCGSRCSSDQVETQACTREQNRICTCRPGWYCALSKQEGCRLCAPLRKCRPGFGVARPDLS

SEQ ID NO: 170 - DNA, 923 bp, Homo Sapiens
  CDS (253)...(777): SR004C05
gcggacactcctctcggctcctccccggcagcggcggcggctcggagcgggctccggggctcgggtgcagcggccagcgggcgcctggcggcgaggattacccggggaagtggttgtctcctggctggagccgcgagacgggcgctcagggcgcggggccggcggcggcgaacgagaggacggactctggcggccgggtcgttggccgcggggagcgcgggcaccgggcgagcaggccgcgtcgcgctcaccatggtcagctactgggacaccggggtcctgctgtgcgcgctgctcagctgtctgcttctcacaggatctagttcaggttcaaaattaaaagatcctgaactgagtttaaaaggcacccagcacatcatgcaagcaggccagacactgcatctccaatgcaggggggaagcagcccataaatggtctttgcctgaaatggtgagtaaggaaagcgaaaggctgagcataactaaatctgcctgtggaagaaatggcaaacaattctgcagtactttaaccttgaacacagctcaagcaaaccacactggcttctacagctgcaaatatctagctgtacctacttcaaagaagaaggaaacagaatctgcaatctatatatttattagtgatacaggtagacctttcgtagagatgtacagtgaaatccccgaaattatacacatgactgaaggaagggagctcgtcattccctgccgggttacgtcacctaacatcactgttactttaaaaaagaagaaggcataaggagaaagtcagatcatggattattttcttctgtttggactcaccgtgcttgggaatacttctgagcattagagagcacttcattcattgcagagtctctggcctccgaggctgccttcaccatcagcagcttcagcttctgggag

SEQ ID NO: 171 - protein, 174 aa, Homo Sapiens [sequence omitted]

SEQ ID NO: 172 - protein, 479 aa, Homo sapiens
  FLT1.c 31
MVSYWDTGVLLCALLSCLLLTGSSSGSKLKDPELSLKGTQHIMQAGQTLHLQCRGEAAHKWSLPEMVSKESERLSITKSACGRNGKQFCSTLTLNTAQANHTGFYSCKYLAVPTSKKKETESAIYIFISDTGRPFVEMYSEIPEIIHMTEGRELVIPCRVTSPNITVTLKKFPLDTLIPDGKRIIWDSRKGFIISNATYKEIGLLTCEATVNGHLYKTNYLTHRQTNTIIDVQISTPRPVKLLRGHTLVLNCTATTPLNTRVQMTWSYPDEKNKRASVRRRIDQSNSHANIFYSVLTIDKMQNKDKGLYTCRVRSGPSFKSVNTSVHIYDKAFITVKHRKQQVLETVAGKRSYRLSMKVKAFPSPEVVWLKDGLPATEKSARYLTRGYSLIIKDVTEEDAGNYTILLSIKQSNVFKNLTATLIVNVKPQIYEKAVSSFPDPALYPLGSRQILTCTAYGIPQPTIKWFWHPCNHNHSEAR

SEQ ID NO: 173 - protein, 523 aa, Homo sapiens
  FLT1.c 32
MVSYWDTGVLLCALLSCLLLTGSSSGSKLKDPELSLKGTQHIMQAGQTLHLQCRGEAAHKWSLPEMVSKESERLSITKSACGRNGKQFCSTLTLNTAQANHTGFYSCKYLAVPTSKKKETESAIYIFISDTGRPFVEMYSEIPEIIHMTEGRELVIPCRVTSPNITVTLKKFPLDTLIPDGKRIIWDSRKGFIISNATYKEIGLLTCEATVNGHLYKTNYLTHRQTNTIIDVQISTPRPVKLLRGHTLVLNCTATTPLNTRVQMTWSYPDEKNKRASVRRRIDQSNSHANIFYSVLTIDKMQNKDKGLYTCRVRSGPSFKSVNTSVHIYDKAFITVKHRKQQVLETVAGKRSYRLSMKVKAFPSPEVVWLKDGLPATEKSARYLTRGYSLIIKDVTEEDAGNYTILLSIKQSNVFKNLTATLIVNVKPQIYEILTCTAYGIPQPTIKWFWHPCNHNHSEARCDFCSNNEESFILDADSNMGNRIESITQRMAIIEGKNKLPPANSSFMLPPTSFSSNYFHFLP

SEQ ID NO: 174 - protein, 436 aa, Homo sapiens
  FLT1.c 33
MVSYWDTGVLLCALLSCLLLTGSSSGSKLKDPELSLKGTQHIMQAGQTLHLQCRGEAAHKWSLPEMVSKESERLSITKSACGRNGKQFCSTLTLNTAQANHTGFYSCKYLAVPTSKKKETESAIYIFISDTGRPFVEMYSEIPEIIHMTEGRELVIPCRVTSPNITVTLKKFPLDTLIPDGKRIIWDSRKGFIISNATYKEIGLLTCEATVNGHLYKTNYLTHRQTNTIIDVQISTPRPVKLLRGHTLVLNCTATTPLNTRVQMTWSYPDEKNKRASVRRRIDQSNSHANIFYSVLTIDKMQNKDKGLYTCRVRSGPSFKSVNTSVHIYDKAFITVKHRKQQVLETVAGKRSYRLSMKVKAFPSPEVVWLKDGLPATEKSARYLTRGYSLIIKDKNLTATLIVNVKPQERIRERISPDLYRIWYPSTYNQVVLAPL

SEQ ID NO: 175 - protein, 365 aa, Homo sapiens
  FLT1.c 34
MVSYWDTGVLLCALLSCLLLTGSSSGSKLKDPELSLKGTQHIMQAGQTLHLQCRGEAAHKWSLPEMVSKESERLSITKSACGRNGKQFCSTLTLNTAQANHTGFYSCKYLAVPTSKKKETESAIYIFISDTGRPFVEMYSEIPEIIHMTEGRELVIPCRVTSPNITVTLKKFPLDTLIPDGKRIIWDSRKGFIISNATYKEIGLLTCEATVNGHLYKTNYLTHRQTNTIIDVQISTPRPVKLLRGHTLVLNCTATTPLNTRVQMTWSYPDEKNKRASVRRRIDQSNSHANIFYSVLTIDKMQNKDKGLYTCRVRSGPSFKSVNTSVHIYGKHSSALPTHAMLSNHCRCLCSLNKSVFCWPRVTLS

SEQ ID NO: 176 - protein, 541 aa, Homo sapiens
  SR018C02
MVSYWDTGVLLCALLSCLLLTGSSSGSKLKDPELSLKGTQHIMQAGQTLHLQCRGEAAHKWSLPEMVSKESERLSITKSACGRNGKQFCSTLTLNTAQANHTGFYSCKYLAVPTSKKKETESAIYIFISDTGRPFVEMYSEIPEIIHMTEGRELVIPCRVTSPNITVTLKKFPLDTLIPDGKRIIWDSRKGFIISNATYKEIGLLTCEATVNGHLYKTNYLTHRQTNTIIDVQISTPRPVKLLRGHTLVLNCTATTPLNTRVQMTWSYPDEKNKRASVRRRIDQSNSHANIFYSVLTIDKMQNKDKGLYTCRVRSGPSFKSVNTSVHIYDKAFITVKHRKQQVLETVAGKRSYRLSMKVKAFPSPEVVWLKDGLPATEKSARYLTRGYSLIIKDVTEEDAGNYTILLSIKQSNVFKNLTATLIVNVKPQIYEKAVSSFPDPALYPLGSRQILTCTAYGIPQPTIKWFWHPCNHNHSEARCDFCSNNEESFILDADSNMGNRIESITQRMAIIEGKNKLPPANSSFMLPPTSFSSNYFHFLP

SEQ ID NO: 177 - protein, 687 aa, Artificial Sequence
  FLT1.d BUILD 31
MVSYWDTGVLLCALLSCLLLTGSSSGSKLKDPELSLKGTQHIMQAGQTLHLQCRGEAAHKWSLPEMVSKESERLSITKSACGRNGKQFCSTLTLNTAQANHTGFYSCKYLAVPTSKKKETESAIYIFISDTGRPFVEMYSEIPEIIHMTEGRELVIPCRVTSPNITVTLKKFPLDTLIPDGKRIIWDSRKGFIISNATYKEIGLLTCEATVNGHLYKTNYLTHRQTNTIIDVQISTPRPVKLLRGHTLVLNCTATTPLNTRVQMTWSYPDEKNKRASVRRRIDQSNSHANIFYSVLTIDKMQNKDKGLYTCRVRSGPSFKSVNTSVHIYDKAFITVKHRKQQVLETVAGKRSYRLSMKVKAFPSPEVVWLKDGLPATEKSARYLTRGYSLIIKDVTEEDAGNYTILLSIKQSNVFKNLTATLIVNVKPQIYEKAVSSFPDPALYPLGSRQILTCTAYGIPQPTIKWFWHPCNHNHSEARCDFCSNNEESFILDADSNMGNRIESITQRMAIIEGKNKMASTLVVADSRISGIYICIASNKVGTVGRNISFYITDVPNGFHVNLEKMPTEGEDLKLSCTVNKFLYRDVTWILLRTVNNRTMHYSISKQKMAITKEHSITLNLTIMNVSLQDSGTYACRARNVYTGEEILQKKEITIRGEHCNKKAVFSRISKFKSTRNDCTTQSNVKH

SEQ ID NO: 178 - DNA, 2432 bp, Homo Sapiens
  SR015F01
catttcgcccggctcgaggtgcaggatgcagagcaaggtgctgctggccgtcgccctgtggctctgcgtggagacccgggccgcctctgtgggtttgcctagtgtttctcttgatctgcccaggctcagcatacaaaaagacatacttacaattaaggctaatacaactcttcaaattacttgcaggggacagagggacttggactggctttggcccaataatcagagtggcagtgagcaaagggtggaggtgactgagtgcagcgatggcctcttctgtaagacactcacaattccaaaagtgatcggaaatgacactggagcctacaagtgcttctaccgggaaactgacttggcctcggtcatttatgtctatgttcaagattacagatctccatttattgcttctgttagtgaccaacatggagtcgtgtacattactgagaacaaaaacaaaactgtggtgattccatgtctcgggtccatttcaaatctcaacgtgtcactttgtgcaagatacccagaaaagagatttgttcctgatggtaacagaatttcctgggacagcaagaagggctttactattcccagctacatgatcagctatgctggcatggtcttctgtgaagcaaaaattaatgatgaaagttaccagtctattatgtacatagttgtcgttgtagggtataggatttatgatgtggttctgagtccgtctcatggaattgaactatctgttggagaaaagcttgtcttaaattgtacagcaagaactgaactaaatgtggggattgacttcaactgggaatacccttcttcgaagcatcagcataagaaacttgtaaaccgagacctaaaaacccagtctgggagtgagatgaagaaatttttgagcaccttaactatagatggtgtaacccggagtgaccaaggattgtacacctgtgcagcatccagtgggctgatgaccaagaagaacagcacatttgtcagggtccatgaaaaaccttttgttgcttttggaagtggcatggaatctctggtggaagccacggtgggggagcgtgtcagaatccctgcgaagtaccttggttacccacccccagaaataaaatggtataaaaatggaataccccttgagtccaatcacacaattaaagcggggcatgtactgacgattatggaagtgagtgaaagagacacaggaaattacactgtcatccttaccaatcccatttcaaaggagaagcagagccatgtggtctctctggttgtgtatgtcccaccccagattggtgagaaatctctaatctctcctgtggattcctaccagtacggcaccactcaaacgctgacatgtacggtctatgccattcctcccccgcatcacatccactggtattggcagttggaggaagagtgcgccaacgagcccagccaagctgtctcagtgacaaacccatacccttgtgaagaatggagaagtgtggaggacttccagggaggaaataaaattgaagttaataaaaatcaatttgctctaattgaaggaaaaaacaaaactgtaagtacccttgttatccaagcggcaaatgtgtcagctttgtacaaatgtgaagcggtcaacaaagtcgggagaggagagagggtgatctccttccacgtgaccaggggtcctgaaattactttgcaacctgacatgcagcccactgagcaggagagcgtgtctttgtggtgcactgcagacagatctacgtttgagaacctcacatggtacaagcttggcccacagcctctgccaatccatgtgggagagttgcccacacctgtttgcaagaacttggatactctttggaaattgaatgccaccatgttctctaatagcacaaatgacattttgatcatggagcttaagaatgcatccttgcaggaccaaggagactatgtctgccttgctcaagacaggaagaccaagaaaagacattgcgtggtcaggcagctcacagtcctagagcgtgtggcacccacgatcacaggaaacctggagaatcagacgacaagtattggggaaagcatcgaagtctcatgcacggcatctgggaatccccctccacagatcatgtggtttaaagataatgagacccttgtagaagactcagagtgaggaaggaggacgaaggcctctacacctgccaggcatgcagtgttcttggctgtgcaaaagtggaggcatttttcataatagaaggtgcccaggaaaagacgaacttggaaatcattattctagtaggcacggcggtgattgccatgttcttctggctacttcttgtcatcatcctacggaccgttaagcgggccaatggaggggaactgaagacaggctacttgtccatcgtcatggatccagatgaactcccattggatgaacattg

SEQ ID NO: 179 - protein, 712 aa, Homo Sapiens
  SR015F01
MQSKVLLAVALWLCVETRAASVGLPSVSLDLPRLSIQKDILTIKANTTLQITCRGQRDLDWLWPNNQSGSEQRVEVTECSDGLFCKTLTIPKVIGNDTGAYKCFYRETDLASVIYVYVQDYRSPFIASVSDQHGVVYITENKNKTVVIPCLGSISNLNVSLCARYPEKRFVPDGNRISWDSKKGFTIPSYMISYAGMVFCEAKINDESYQSIMYIVVVVGYRIYDVVLSPSHGIELSVGEKLVLNCTARTELNVGIDFNWEYPSSKHQHKKLVNRDLKTQSGSEMKKFLSTLTIDGVTRSDQGLYTCAASSGLMTKKNSTFVRVHEKPFVAFGSGMESLVEATVGERVRIPAKYLGYPPPEIKWYKNGIPLESNHTIKAGHVLTIMEVSERDTGNYTVILTNPISKEKQSHVVSLVVYVPPQIGEKSLISPVDSYQYGTTQTLTCTVYAIPPPHHIHWYWQLEEECANEPSQAVSVTNPYPCEEWRSVEDFQGGNKIEVNKNQFALIEGKNKTVSTLVIQAANVSALYKCEAVNKVGRGERVISFHVTRGPEITLQPDMQPTEQESVSLWCTADRSTFENLTWYKLGPQPLPIHVGELPTPVCKNLDTLWKLNATMFSNSTNDILIMELKNASLQDQGDYVCLAQDRKTKKRHCVVRQLTVLERVAPTITGNLENQTTSIGESIEVSCTASGNPPPQIMWFKDNETLVEDSE

SEQ ID NO: 180 - DNA, 783 bp, Homo Sapiens
  CDS (17)...(700): SR007E10
cgcgcagcggccggagatgcagcggggcgccgcgctgtgcctgcgactgtggctctgcctgggactcctggacggcctggtgagtggctactccatgacccccccgaccttgaacatcacggaggagtcacacgtcatcgacaccggtgacagcctgtccatctcctgcaggggacagcaccccctcgagtgggcttggccaggagctcaggaggcgccagccaccggagacaaggacagcgaggacacgggggtggtgcgagactgcgagggcacagacgccaggccctactgcaaggtgttgctgctgcacgaggtacatgccaacgacacaggcagctacgtctgctactacaagtacatcaaggcacgcatcgagggcaccacggccgccagctcctacgtgttcgtgagaggaaggacgccatgtgggtgccctgtctggtgtccatccccggcctcaatgtcacgctgcgctcgcaaagctcggtgctgtggccagacgggcaggaggtggtgtgggatgaccggcggggcatgctcgtgtccacgccactgctgcacgatgccctgtacctgcagtgcgagaccacctggggagaccaggacttcctttccaaccccttcctggtgcacatcacaggcaacgagctctatgacatccagctgttgcccaggaagtcgctggagctgctggtaggggagaagctggtcctgaactgcaccgtgtgggctgagtttaactcaggtgtcacctttgactgggactacccagggaagcag

SEQ ID NO: 181 - protein, 227 aa, Homo Sapiens
  SR007E10
MQRGAALCLRLWLCLGLLDGLVSGYSMTPPTLNITEESHVIDTGDSLSISCRGQHPLEWAWPGAQEAPATGDKDSEDTGVVRDCEGTDARPYCKVLLLHEVHANDTGSYVCYYKYIKARIEGTTAASSYVFVRGRTPCGCPVWCPSPASMSRCARKARCCGQTGRRWCGMTGGACSCPRHCCTMPCTCSARPPGETRTSFPTPSWCTSQATSSMTSSCCPGSRWSCW

SEQ ID NO: 182 - DNA, 1356 bp, Homo Sapiens
  CDS (16)...(903): SR007F05
gcgcagcggccggagatgcagcggggcgccgcgctgtgcctgcgactgtggctctgcctgggactcctggacggcctggtgagtggctactccatgacccccccgaccttgaacatcacggaggagtcacacgtcatcgacaccggtgacagcctgtccatctcctgcaggggacagcaccccctcgagtgggcttggccaggagctcaggaggcgccagccaccggagacaaggacagcgaggacacgggggtggtgcgagactgcgagggcacagacgccaggccctactgcaaggtgttgctgctgcacgaggtacatgccaacgacacaggcagctacgtctgctactacaagtacatcaaggcacgcatcgagggcaccacggccgccagctcctacgtgttcgtgagagactttgagcagccattcatcaacaagcctgacacgctcttggtcaacaggaaggacgccatgtgggtgccctgtctggtgtccatccccggcctcaatgtcacgctgcgctcgcaaagctcggtgctgtggccagacgggcaggaggtggtgtgggatgaccggcggggcatgctcgtgtccacgccactgctgcacgatgccctgtacctgcagtgcgagaccacctggggagaccaggacttcctttccaaccccttcctggtgcacatcacaggcaacgagctctatgacatccagctgttgcccaggaagtcgctggagctgctggtaggggagaagctggtcctgaactgcaccgtgtgggctgagtttaactcaggtgtcacctttgactgggactacccagggaagcagaaaatcccttcatcagcgtcgagtggctcaaaggacccatcctggaggccacggcaggagacgagctggtgaagctgcccgtgaagctggcagcgtaccccccgcccgagttccagtggtacaaggatggaaaggcactgtccgggcgccacagtccacatgccctggtgctcaaggaggtgacagaggccagcacaggcacctacaccctcgccctgtggaactccgctgctggcctgaggcgcaacatcagcctggagctggtggtgaatgtgcccccccagatacatgagaaggaggcctcctcccccagcatctactcgcgtcacagccgccaggccctcacctgcacggcctacggggtgcccctgcctctcagcatccagtggcactggcggccctggacaccctgcaagatgtttgcccagcgtagtctccggcggcggcagcagcaagacctcatgccacagtgccgtgactggagggcggtgaccacgcaggatgccgtgaaccccatcgagagcc

SEQ ID NO: 183 - protein, 295 aa, Homo Sapiens
  SR007F05
MQRGAALCLRLWLCLGLLDGLVSGYSMTPPTLNITEESHVIDTGDSLSISCRGQHPLEWAWPGAQEAPATGDKDSEDTGVVRDCEGTDARPYCKVLLLHEVHANDTGSYVCYYKYIKARIEGTTAASSYVFVRDFEQPFINKPDTLLVNRKDAMWVPCLVSIPGLNVTLRSQSSVLWPDGQEVVWDDRRGMLVSTPLLHDALYLQCETTWGDQDFLSNPFLVHITGNELYDIQLLPRKSLELLVGEKLVLNCTVWAEFNSGVTFDWDYPGKQKIPSSASSGSKDPSWRPRQETSW

SEQ ID NO: 184 - DNA, 2620 bp, Homo Sapiens
  SR015G09
gcagcggccggagatgcagcggggcgccgcgctgtgcctgcgactgtggctctgcctgggactcctggacggcctggtgagtggctactccatgacccccccgaccttgaacatcacggaggagtcacacgtcatcgacaccggtgacagcctgtccatctcctgcaggggacagcaccccctcgagtgggcttggccaggagctcaggaggcgccagccaccggagacaaggacagcgaggacacgggggtggtgcgagactgcgagggcacagacgccaggccctactgcaaggtgttgctgctgcacgaggtacatgccaacgacacaggcagctacgtctgctactacaagtacatcaaggcacgcatcgagggcaccacggccgccagctcctacgtgttcgtgagagactttgagcagccattcatcaacaagcctgacacgctcttggtcaacaggaaggacgccatgtgggtgccctgtctggtgtccatccccggcctcaatgtcacgctgcgctcgcaaagctcggtgctgtggccagacgggcaggaggtggtgtgggatgaccggcggggcatgctcgtgtccacgccactgctgcacgatgccctgtacctgcagtgcgagaccacctggggagaccaggacttcctttccaaccccttcctggtgcacatcacaggcaacgagctctatgacatccagctgttgcccaggaagtcgctggagctgctggtaggggagaagctggtcctgaactgcaccgtgtgggctgagtttaactcaggtgtcacctttgactgggactacccagggaagcaggcagagcggggtaagtgggtgcccgagcgacgctcccagcagacccacacagaactctccagcatcctgaccatccacaacgtcagccagcacgacctgggctcgtatgtgtgcaaggccaacaacggcatccagcgatttcgggagagcaccgaggtcattgtgcatgaaaatcccttcatcagcgtcgagtggctcaaaggacccatcctggaggccacggcaggagacgagctggtgaagctgcccgtgaagctggcagcgtaccccccgcccgagttccagtggtacaaggatggaaaggcactgtccgggcgccacagtccacatgccctggtgctcaaggaggtgacagaggccagcacaggcacctacaccctcgccctgtggaactccgctgctggcctgaggcgcaacatcagcctggagctggtggtgaatgtgcccccccagatacatgagaaggaggcctcctcccccagcatctactcgcgtcacagccgccaggccctcacctgcacggcctacggggtgcccctgcctctcagcatccagtggcactggcggccctggacaccctgcaagatgtttgcccagcgtagtctccggcggcggcagcagcaagacctcatgccacagtgccgtgactggagggcggtgaccacgcaggatgccgtgaaccccatcgagagcctggacacctggaccgagtttgtggagggaaagaataagactgtgagcaagctggtgatccagaatgccaacgtgtctgccatgtacaagtgtgtggtctccaacaaggtgggccaggatgagcggctcatctacttctatgtgaccaccatccccgacggcttcaccatcgaatccaagccatccgaggagctactagagggccagccggtgctcctgagctgccaagccgacagctacaagtacgagcatctgcgctggtaccgcctcaacctgtccacgctgcacgatgcgcacgggaacccgcttctgctcgactgcaagaacgtgcatctgttcgccacccctctggccgccagcctggaggaggtggcacctggggcgcgccacgccacgctcagcctgagtatcccccgcgtcgcgcccgagcacgagggccactatgtgtgcgaagtgcaagaccggcgcagccatgacaagcactgccacaagaagtacctgtcggtgcaggccctggaagcccctcggctcacgcagaacttgaccgacctcctggtgaacgtgagcgactcgctggagatgcagtgcttggtggccggagcgcacgcgcccagcatcgtgtggtacaaagacgagaggctgctggaggaaaagtctggtagggagggtggccctggcgaagggcaggtccggaggcccgcgaggccgacgatcccaaacccaggtggacccgcacctccaccccaccccctgcaggagtcgacttggcggactccaaccagaagctgagcatccagcgcgtgcgcgaggaggatgcgggacgctatctgtgcagcgtgtgcaacgccaagggctgcgtcaactcctccgccagcgtggccgtggaaggctccgaggataagggcagcatggagatcgtgatccttgtcggtaccggcgtcatcgctgtcttcttctgggtcctcctcctcctcatcttctgtaacatgaggaggccggcccacgcagacatcaagacgggctacctgtccatcatcatggaccccggggaggtgcctctggaggagcaatgcgaatacctgtcctacgatgccagcc

SEQ ID NO: 185 - protein, 765 aa, Homo Sapiens
  SR015G09
MQRGAALCLRLWLCLGLLDGLVSGYSMTPPTLNITEESHVIDTGDSLSISCRGQHPLEWAWPGAQEAPATGDKDSEDTGVVRDCEGTDARPYCKVLLLHEVHANDTGSYVCYYKYIKARIEGTTAASSYVFVRDFEQPFINKPDTLLVNRKDAMWVPCLVSIPGLNVTLRSQSSVLWPDGQEVVWDDRRGMLVSTPLLHDALYLQCETTWGDQDFLSNPFLVHITGNELYDIQLLPRKSLELLVGEKLVLNCTVWAEFNSGVTFDWDYPGKQAERGKWVPERRSQQTHTELSSILTIHNVSQHDLGSYVCKANNGIQRFRESTEVIVHENPFISVEWLKGPILEATAGDELVKLPVKLAAYPPPEFQWYKDGKALSGRHSPHALVLKEVTEASTGTYTLALWNSAAGLRRNISLELVVNVPPQIHEKEASSPSIYSRHSRQALTCTAYGVPLPLSIQWHWRPWTPCKMFAQRSLRRRQQQDLMPQCRDWRAVTTQDAVNPIESLDTWTEFVEGKNKTVSKLVIQNANVSAMYKCVVSNKVGQDERLIYFYVTTIPDGFTIESKPSEELLEGQPVLLSCQADSYKYEHLRWYRLNLSTLHDAHGNPLLLDCKNVHLFATPLAASLEEVAPGARHATLSLSIPRVAPEHEGHYVCEVQDRRSHDKHCHKKYLSVQALEAPRLTQNLTDLLVNVSDSLEMQCLVAGAHAPSIVWYKDERLLEEKSGREGGPGEGQVRRPARPTIPNPGGPAPPPHPLQESTWRTPTRS

SEQ ID NO: 186 - protein, 419 aa, Homo sapiens
  Herstatin
MELAALCRWGLLLALLPPGAASTQVCTGTDMKLRLPASPETHLDMLRHLYQGCQVVQGNLELTYLPTNASLSFLQDIQEVQGYVLIAHNQVRQVPLQRLRIVRGTQLFEDNYALAVLDNGDPLNNTTPVTGASPGGLRELQLRSLTEILKGGVLIQRNPQLCYQDTILWKDIFHKNNQLALTLIDTNRSRACHPCSPMCKGSRCWGESSEDCQSLTRTVCAGGCARCKGPLPTDCCHEQCAAGCTGPKHSDCLACLHFNHSGICELHCPALVTYNTDTFESMPNPEGRYTFGASCVTACPYNYLSTDVGSCTLVCPLHNQEVTAEDGTQRCEKCSKPCARGTHSLPPRPAAVPVPLRMQPGPAHPVLSFLRPSWDLVSAFYSLPLAPLDPTSVPISPVSVGRGPSPDAHVAVDLSRYEG

SEQ ID NO: 187 - protein, 419 aa, Homo sapiens
  VARIANT 342: Xaa= Thr or Ser
  Herstatin variant
MELAALCRWGLLLALLPPGAASTQVCTGTDMKLRLPASPETHLDMLRHLYQGCQVVQGNLELTYLPTNASLSFLQDIQEVQGYVLIAHNQVRQVPLQRLRIVRGTQLFEDNYALAVLDNGDPLNNTTPVTGASPGGLRELQLRSLTEILKGGVLIQRNPQLCYQDTILWKDIFHKNNQLALTLIDTNRSRACHPCSPMCKGSRCWGESSEDCQSLTRTVCAGGCARCKGPLPTDCCHEQCAAGCTGPKHSDCLACLHFNHSGICELHCPALVTYNTDTFESMPNPEGRYTFGASCVTACPYNYLSTDVGSCTLVCPLHNQEVTAEDGTQRCEKCSKPCARGXHSLPPRPAAVPVPLRMQPGPAHPVLSFLRPSWDLVSAFYSLPLAPLSPTSVPISPVSVGRGPDPDAHVAVDLSRYEG

SEQ ID NO: 188 - protein, 419 aa, Homo sapiens
  VARIANT 345: Xaa= Leu or Pro
  Herstatin variant
MELAALCRWGLLLALLPPGAASTQVCTGTDMKLRLPASPETHLDMLRHLYQGCQVVQGNLELTYLPTNASLSFLQDIQEVQGYVLIAHNQVRQVPLQRLRIVRGTQLFEDNYALAVLDNGDPLNNTTPVTGASPGGLRELQLRSLTEILKGGVLIQRNPQLCYQDTILWKDIFHKNNQLALTLIDTNRSRACHPCSPMCKGSRCWGESSEDCQSLTRTVCAGGCARCKGPLPTDCCHEQCAAGCTGPKHSDCLACLHFNHSGICELHCPALVTYNTDTFESMPNPEGRYTFGASCVTACPYNYLSTDVGSCTLVCPLHNQEVTAEDGTQRCEKCSKPCARGTHSXPPRPAAVPVPLRMQPGPAHPVLSFLRPSWDLVSAFYSLPLAPLSPTSVPISPVSVGRGPDPDAHVAVDLSRYEG

SEQ ID NO: 189 - protein, 419 aa, Homo sapiens
  VARIANT 346: Xaa= Pro or Leu
  Herstatin variant
MELAALCRWGLLLALLPPGAASTQVCTGTDMKLRLPASPETHLDMLRHLYQGCQVVQGNLELTYLPTNASLSFLQDIQEVQGYVLIAHNQVRQVPLQRLRIVRGTQLFEDNYALAVLDNGDPLNNTTPVTGASPGGLRELQLRSLTEILKGGVLIQRNPQLCYQDTILWKDIFHKNNQLALTLIDTNRSRACHPCSPMCKGSRCWGESSEDCQSLTRTVCAGGCARCKGPLPTDCCHEQCAAGCTGPKHSDCLACLHFNHSGICELHCPALVTYNTDTFESMPNPEGRYTFGASCVTACPYNYLSTDVGSCTLVCPLHNQEVTAEDGTQRCEKCSKPCARGTHSLXPRPAAVPVPLRMQPGPAHPVLSFLRPSWDLVSAFYSLPLAPLSPTSVPISPVSVGRGPDPDAHVAVDLSRYEG

SEQ ID NO: 190 - protein, 419 aa, Homo sapiens
  VARIANT 356: Xaa= Leu or Gln
  Herstatin variant
MELAALCRWGLLLALLPPGAASTQVCTGTDMKLRLPASPETHLDMLRHLYQGCQVVQGNLELTYLPTNASLSFLQDIQEVQGYVLIAHNQVRQVPLQRLRIVRGTQLFEDNYALAVLDNGDPLNNTTPVTGASPGGLRELQLRSLTEILKGGVLIQRNPQLCYQDTILWKDIFHKNNQLALTLIDTNRSRACHPCSPMCKGSRCWGESSEDCQSLTRTVCAGGCARCKGPLPTDCCHEQCAAGCTGPKHSDCLACLHFNHSGICELHCPALVTYNTDTFESMPNPEGRYTFGASCVTACPYNYLSTDVGSCTLVCPLHNQEVTAEDGTQRCEKCSKPCARGTHSLPPRPAAVPVPXRMQPGPAHPVLSFLRPSWDLVSAFYSLPLAPLSPTSVPISPVSVGRGPDPDAHVAVDLSRYEG

SEQ ID NO: 191 - protein, 419 aa, Homo sapiens
  VARIANT 357: Xaa= Arg or Cys
  Herstatin variant
MELAALCRWGLLLALLPPGAASTQVCTGTDMKLRLPASPETHLDMLRHLYQGCQVVQGNLELTYLPTNASLSFLQDIQEVQGYVLIAHNQVRQVPLQRLRIVRGTQLFEDNYALAVLDNGDPLNNTTPVTGASPGGLRELQLRSLTEILKGGVLIQRNPQLCYQDTILWKDIFHKNNQLALTLIDTNRSRACHPCSPMCKGSRCWGESSEDCQSLTRTVCAGGCARCKGPLPTDCCHEQCAAGCTGPKHSDCLACLHFNHSGICELHCPALVTYNTDTFESMPNPEGRYTFGASCVTACPYNYLSTDVGSCTLVCPLHNQEVTAEDGTQRCEKCSKPCARGTHSLPPRPAAVPVPLXMQPGPAHPVLSFLRPSWDLVSAFYSLPLAPLSPTSVPISPVSVGRGPDPDAHVAVDLSRYEG

SEQ ID NO: 192 - protein, 419 aa, Homo sapiens
  VARIANT 358: Xaa= Met or Leu
  Herstatin variant
MELAALCRWGLLLALLPPGAASTQVCTGTDMKLRLPASPETHLDMLRHLYQGCQVVQGNLELTYLPTNASLSFLQDIQEVQGYVLIAHNQVRQVPLQRLRIVRGTQLFEDNYALAVLDNGDPLNNTTPVTGASPGGLRELQLRSLTEILKGGVLIQRNPQLCYQDTILWKDIFHKNNQLALTLIDTNRSRACHPCSPMCKGSRCWGESSEDCQSLTRTVCAGGCARCKGPLPTDCCHEQCAAGCTGPKHSDCLACLHFNHSGICELHCPALVTYNTDTFESMPNPEGRYTFGASCVTACPYNYLSTDVGSCTLVCPLHNQEVTAEDGTQRCEKCSKPCARGTHSLPPRPAAVPVPLRXQPGPAHPVLSFLRPSWDLVSAFYSLPLAPLSPTSVPISPVSVGRGPDPDAHVAVDLSRYEG

SEQ ID NO: 193 - protein, 419 aa, Homo sapiens; identical to SEQ ID NO: 192
  VARIANT 358: Xaa= Met or Ile
  Herstatin variant

SEQ ID NO: 194 - protein, 419 aa, Homo sapiens
  VARIANT 361: Xaa= Gly, Asp, Ala, or Val
  Herstatin variant
MELAALCRWGLLLALLPPGAASTQVCTGTDMKLRLPASPETHLDMLRHLYQGCQVVQGNLELTYLPTNASLSFLQDIQEVQGYVLIAHNQVRQVPLQRLRIVRGTQLFEDNYALAVLDNGDPLNNTTPVTGASPGGLRELQLRSLTEILKGGVLIQRNPQLCYQDTILWKDIFHKNNQLALTLIDTNRSRACHPCSPMCKGSRCWGESSEDCQSLTRTVCAGGCARCKGPLPTDCCHEQCAAGCTGPKHSDCLACLHFNHSGICELHCPALVTYNTDTFESMPNPEGRYTFGASCVTACPYNYLSTDVGSCTLVCPLHNQEVTAEDGTQRCEKCSKPCARGTHSLPPRPAAVPVPLRMQPXPAHPVLSFLRPSWDLVSAFYSLPLAPLSPTSVPISPVSVGRGPDPDAHVAVDLSRYEG

SEQ ID NO: 195 - protein, 419 aa, Homo sapiens
  VARIANT 371: Xaa= Arg or Ile
  Herstatin variant
MELAALCRWGLLLALLPPGAASTQVCTGTDMKLRLPASPETHLDMLRHLYQGCQVVQGNLELTYLPTNASLSFLQDIQEVQGYVLIAHNQVRQVPLQRLRIVRGTQLFEDNYALAVLDNGDPLNNTTPVTGASPGGLRELQLRSLTEILKGGVLIQRNPQLCYQDTILWKDIFHKNNQLALTLIDTNRSRACHPCSPMCKGSRCWGESSEDCQSLTRTVCAGGCARCKGPLPTDCCHEQCAAGCTGPKHSDCLACLHFNHSGICELHCPALVTYNTDTFESMPNPEGRYTFGASCVTACPYNYLSTDVGSCTLVCPLHNQEVTAEDGTQRCEKCSKPCARGTHSLPPRPAAVPVPLRMQPGPAHPVLSFLXPSWDLVSAFYSLPLAPLSPTSVPISPVSVGRGPDPDAHVAVDLSRYEG

SEQ ID NO: 196 - protein, 419 aa, Homo sapiens
  VARIANT 376: Xaa= Leu or Ile
  Herstatin variant
MELAALCRWGLLLALLPPGAASTQVCTGTDMKLRLPASPETHLDMLRHLYQGCQVVQGNLELTYLPTNASLSFLQDIQEVQGYVLIAHNQVRQVPLQRLRIVRGTQLFEDNYALAVLDNGDPLNNTTPVTGASPGGLRELQLRSLTEILKGGVLIQRNPQLCYQDTILWKDIFHKNNQLALTLIDTNRSRACHPCSPMCKGSRCWGESSEDCQSLTRTVCAGGCARCKGPLPTDCCHEQCAAGCTGPKHSDCLACLHFNHSGICELHCPALVTYNTDTFESMPNPEGRYTFGASCVTACPYNYLSTDVGSCTLVCPLHNQEVTAEDGTQRCEKCSKPCARGTHSLPPRPAAVPVPLRMQPGPAHPVLSFLRPSWDXVSAFYSLPLAPLSPTSVPISPVSVGRGPDPDAHVAVDLSRYEG

SEQ ID NO: 197 - protein, 419 aa, Homo sapiens
  VARIANT 394: Xaa= Pro or Arg
  Herstatin variant
MELAALCRWGLLLALLPPGAASTQVCTGTDMKLRLPASPETHLDMLRHLYQGCQVVQGNLELTYLPTNASLSFLQDIQEVQGYVLIAHNQVRQVPLQRLRIVRGTQLFEDNYALAVLDNGDPLNNTTPVTGASPGGLRELQLRSLTEILKGGVLIQRNPQLCYQDTILWKDIFHKNNQLALTLIDTNRSRACHPCSPMCKGSRCWGESSEDCQSLTRTVCAGGCARCKGPLPTDCCHEQCAAGCTGPKHSDCLACLHFNHSGICELHCPALVTYNTDTFESMPNPEGRYTFGASCVTACPYNYLSTDVGSCTLVCPLHNQEVTAEDGTQRCEKCSKPCARGTHSLPPRPAAVPVPLRMQPGPAHPVLSFLRPSWDLVSAFYSLPLAPLSPTSVXISPVSVGRGPDPDAHVAVDLSRYEG

SEQ ID NO: 198 - protein, 419 aa, Homo sapiens
  VARIANT 404: Xaa= Pro or Leu
  Herstatin variant
MELAALCRWGLLLALLPPGAASTQVCTGTDMKLRLPASPETHLDMLRHLYQGCQVVQGNLELTYLPTNASLSFLQDIQEVQGYVLIAHNQVRQVPLQRLRIVRGTQLFEDNYALAVLDNGDPLNNTTPVTGASPGGLRELQLRSLTEILKGGVLIQRNPQLCYQDTILWKDIFHKNNQLALTLIDTNRSRACHPCSPMCKGSRCWGESSEDCQSLTRTVCAGGCARCKGPLPTDCCHEQCAAGCTGPKHSDCLACLHFNHSGICELHCPALVTYNTDTFESMPNPEGRYTFGASCVTACPYNYLSTDVGSCTLVCPLHNQEVTAEDGTQRCEKCSKPCARGTHSLPPRPAAVPVPLRMQPGPAHPVLSFLRPSWDLVSAFYSLPLAPLSPTSVPISPVSVGRGXDPDAHVAVDLSRYEG

SEQ ID NO: 199 - protein, 419 aa, Homo sapiens
  VARIANT 413: Xaa= Asp, Asn, or His
  Herstatin variant
MELAALCRWGLLLALLPPGAASTQVCTGTDMKLRLPASPETHLDMLRHLYQGCQVVQGNLELTYLPTNASLSFLQDIQEVQGYVLIAHNQVRQVPLQRLRIVRGTQLFEDNYALAVLDNGDPLNNTTPVTGASPGGLRELQLRSLTEILKGGVLIQRNPQLCYQDTILWKDIFHKNNQLALTLIDTNRSRACHPCSPMCKGSRCWGESSEDCQSLTRTVCAGGCARCKGPLPTDCCHEQCAAGCTGPKHSDCLACLHFNHSGICELHCPALVTYNTDTFESMPNPEGRYTFGASCVTACPYNYLSTDVGSCTLVCPLHNQEVTAEDGTQRCEKCSKPCARGTHSLPPRPAAVPVPLRMQPGPAHPVLSFLRPSWDLVSAFYSLPLAPLSPTSVPISPVSVGRGPDPDAHVAVXLSRYEG

SEQ ID NO: 200 - protein, 419 aa, Homo sapiens
  VARIANT 346: Xaa= Pro or Leu
  VARIANT 413: Xaa= Asp, His, or Asn
  Herstatin variant
MELAALCRWGLLLALLPPGAASTQVCTGTDMKLRLPASPETHLDMLRHLYQGCQVVQGNLELTYLPTNASLSFLQDIQEVQGYVLIAHNQVRQVPLQRLRIVRGTQLFEDNYALAVLDNGDPLNNTTPVTGASPGGLRELQLRSLTEILKGGVLIQRNPQLCYQDTILWKDIFHKNNQLALTLIDTNRSRACHPCSPMCKGSRCWGESSEDCQSLTRTVCAGGCARCKGPLPTDCCHEQCAAGCTGPKHSDCLACLHFNHSGICELHCPALVTYNTDTFESMPNPEGRYTFGASCVTACPYNYLSTDVGSCTLVCPLHNQEVTAEDGTQRCEKCSKPCARGTHSLXPRPAAVPVPLRMQPGPAHPVLSFLRPSWDLVSAFYSLPLAPLSPTSVPISPVSVGRGPDPDAHVAVXLSRYEG

SEQ ID NO: 201 - DNA, 1316 bp, Homo sapiens
  Herstatin
gcagtgagcaccatggagctggcggccttgtgccgctgggggctcctcctcgccctcttgccccccggagccgcgagcacccaagtgtgcaccggcacagacatgaagctgcggctccctgccagtcccgagacccacctggacatgctccgccacctctaccagggatgccaggtggtgcagggaaacctggaactcacctacctgcccaccaatgccagcctgtccttcctgcaggatatccaggaggtgcagggctacgtgctcatcgctcacaaccaagtgaggcaggtcccactgcagaggctgcggattgtgcgaggcacccagctctttgaggacaactatgccctggccgtgctagacaatggagacccgctgaacaataccacccctgtcacaggggcctccccaggaggcctgcgggagctgcagcttcgaagcctcacagagatcttgaaaggaggggtcttgatccagcggaacccccagctctgctaccaggacacgattttgtggaaggacatcttccacaagaacaaccagctggctctcacactgatagacaccaaccgctctcgggcctgccacccctgctctccgatgtgtaagggctcccgctgctggggagagagttctgaggattgtcagagcctgacgcgcactgtctgtgccggtggctgtgcccgctgcaaggggccactgcccactgactgctgccatgagcagtgtgctgccggctgcacgggccccaagcactctgactgcctggcctgcctccacttcaaccacagtggcatctgtgagctgcactgcccagccctggtcacctacaacacagacacgtttgagtccatgcccaatcccgagggccggtatacattcggcgccagctgtgtcactgcctgtccctacaactacctttctacggacgtgggatcctgcaccctcgtctgccccctgcacaaccaagaggtgacagcagaggatggaacacagcggtgtgagaagtgcagcaagccctgtgcccgaggtacccactcactgcccccgaggccagctgcagttcctgtccctctgcgcatgcagcctggcccagcccaccctgtcctatccttcctcagaccctcttgggacctagtctctgccttctactctctacccctggcccccctcagccctacaagtgtccctatatcccctgtcagtgtggggaggggcccggaccctgatgctcatgtggctgttgacctgtcccggtatgaaggctgagacggccccttccccacccacccccacctcctcagtgtgctatg

SEQ ID NO: 202 - DNA, 1316 bp, Homo sapiens
  allele 1036: n= A or T
  Herstatin variant
gcagtgagcaccatggagctggcggccttgtgccgctgggggctcctcctcgccctcttgccccccggagccgcgagcacccaagtgtgcaccggcacagacatgaagctgcggctccctgccagtcccgagacccacctggacatgctccgccacctctaccagggatgccaggtggtgcagggaaacctggaactcacctacctgcccaccaatgccagcctgtccttcctgcaggatatccaggaggtgcagggctacgtgctcatcgctcacaaccaagtgaggcaggtcccactgcagaggctgcggattgtgcgaggcacccagctctttgaggacaactatgccctggccgtgctagacaatggagacccgctgaacaataccacccctgtcacaggggcctccccaggaggcctgcgggagctgcagcttcgaagcctcacagagatcttgaaaggaggggtcttgatccagcggaacccccagctctgctaccaggacacgattttgtggaaggacatcttccacaagaacaaccagctggctctcacactgatagacaccaaccgctctcgggcctgccacccctgctctccgatgtgtaagggctcccgctgctggggagagagttctgaggattgtcagagcctgacgcgcactgtctgtgccggtggctgtgcccgctgcaaggggccactgcccactgactgctgccatgagcagtgtgctgccggctgcacgggccccaagcactctgactgcctggcctgcctccacttcaaccacagtggcatctgtgagctgcactgcccagccctggtcacctacaacacagacacgtttgagtccatgcccaatcccgagggccggtatacattcggcgccagctgtgtcactgcctgtccctacaactacctttctacggacgtgggatcctgcaccctcgtctgccccctgcacaaccaagaggtgacagcagaggatggaacacagcggtgtgagaagtgcagcaagccctgtgcccgaggtncccactcactgcccccgaggccagctgcagttcctgtccctctgcgcatgcagcctggcccagcccaccctgtcctatccttcctcagaccctcttgggacctagtctctgccttctactctctacccctggcccccctcagccctacaagtgtccctatatcccctgtcagtgtggggaggggcccggaccctgatgctcatgtggctgttgacctgtcccggtatgaaggctgagacggccccttccccacccacccccacctcctcagtgtgctatg

SEQ ID NO: 203 - DNA, 1316 bp, Homo sapiens
  allele 1046: n= T or C
  Herstatin variant
gcagtgagcaccatggagctggcggccttgtgccgctgggggctcctcctcgccctcttgccccccggagccgcgagcacccaagtgtgcaccggcacagacatgaagctgcggctccctgccagtcccgagacccacctggacatgctccgccacctctaccagggatgccaggtggtgcagggaaacctggaactcacctacctgcccaccaatgccagcctgtccttcctgcaggatatccaggaggtgcagggctacgtgctcatcgctcacaaccaagtgaggcaggtcccactgcagaggctgcggattgtgcgaggcacccagctctttgaggacaactatgccctggccgtgctagacaatggagacccgctgaacaataccacccctgtcacaggggcctccccaggaggcctgcgggagctgcagcttcgaagcctcacagagatcttgaaaggaggggtcttgatccagcggaacccccagctctgctaccaggacacgattttgtggaaggacatcttccacaagaacaaccagctggctctcacactgatagacaccaaccgctctcgggcctgccacccctgctctccgatgtgtaagggctcccgctgctggggagagagttctgaggattgtcagagcctgacgcgcactgtctgtgccggtggctgtgcccgctgcaaggggccactgcccactgactgctgccatgagcagtgtgctgccggctgcacgggccccaagcactctgactgcctggcctgcctccacttcaaccacagtggcatctgtgagctgcactgcccagccctggtcacctacaacacagacacgtttgagtccatgcccaatcccgagggccggtatacattcggcgccagctgtgtcactgcctgtccctacaactacctttctacggacgtgggatcctgcaccctcgtctgccccctgcacaaccaagaggtgacagcagaggatggaacacagcggtgtgagaagtgcagcaagccctgtgcccgaggtacccactcacngcccccgaggccagctgcagttcctgtccctctgcgcatgcagcctggcccagcccaccctgtcctatccttcctcagaccctcttgggacctagtctctgccttctactctctacccctggcccccctcagccctacaagtgtccctatatcccctgtcagtgtggggaggggcccggaccctgatgctcatgtggctgttgacctgtcccggtatgaaggctgagacggccccttccccacccacccccacctcctcagtgtgctatg

SEQ ID NO: 204 - DNA, 1316 bp, Homo sapiens
  allele 1049: n= C or T
  Herstatin variant
gcagtgagcaccatggagctggcggccttgtgccgctgggggctcctcctcgccctcttgccccccggagccgcgagcacccaagtgtgcaccggcacagacatgaagctgcggctccctgccagtcccgagacccacctggacatgctccgccacctctaccagggatgccaggtggtgcagggaaacctggaactcacctacctgcccaccaatgccagcctgtccttcctgcaggatatccaggaggtgcagggctacgtgctcatcgctcacaaccaagtgaggcaggtcccactgcagaggctgcggattgtgcgaggcacccagctctttgaggacaactatgccctggccgtgctagacaatggagacccgctgaacaataccacccctgtcacaggggcctccccaggaggcctgcgggagctgcagcttcgaagcctcacagagatcttgaaaggaggggtcttgatccagcggaacccccagctctgctaccaggacacgattttgtggaaggacatcttccacaagaacaaccagctggctctcacactgatagacaccaaccgctctcgggcctgccacccctgctctccgatgtgtaagggctcccgctgctggggagagagttctgaggattgtcagagcctgacgcgcactgtctgtgccggtggctgtgcccgctgcaaggggccactgcccactgactgctgccatgagcagtgtgctgccggctgcacgggccccaagcactctgactgcctggcctgcctccacttcaaccacagtggcatctgtgagctgcactgcccagccctggtcacctacaacacagacacgtttgagtccatgcccaatcccgagggccggtatacattcggcgccagctgtgtcactgcctgtccctacaactacctttctacggacgtgggatcctgcaccctcgtctgccccctgcacaaccaagaggtgacagcagaggatggaacacagcggtgtgagaagtgcagcaagccctgtgcccgaggtacccactcactgcncccgaggccagctgcagttcctgtccctctgcgcatgcagcctggcccagcccaccctgtcctatccttcctcagaccctcttgggacctagtctctgccttctactctctacccctggcccccctcagccctacaagtgtccctatatcccctgtcagtgtggggaggggcccggaccctgatgctcatgtggctgttgacctgtcccggtatgaaggctgagacggccccttccccacccacccccacctcctcagtgtgctatg

SEQ ID NO: 205 - DNA, 1316 bp, Homo sapiens
  allele 1079: n= T or A
  Herstatin variant
gcagtgagcaccatggagctggcggccttgtgccgctgggggctcctcctcgccctcttgccccccggagccgcgagcacccaagtgtgcaccggcacagacatgaagctgcggctccctgccagtcccgagacccacctggacatgctccgccacctctaccagggatgccaggtggtgcagggaaacctggaactcacctacctgcccaccaatgccagcctgtccttcctgcaggatatccaggaggtgcagggctacgtgctcatcgctcacaaccaagtgaggcaggtcccactgcagaggctgcggattgtgcgaggcacccagctctttgaggacaactatgccctggccgtgctagacaatggagacccgctgaacaataccacccctgtcacaggggcctccccaggaggcctgcgggagctgcagcttcgaagcctcacagagatcttgaaaggaggggtcttgatccagcggaacccccagctctgctaccaggacacgattttgtggaaggacatcttccacaagaacaaccagctggctctcacactgatagacaccaaccgctctcgggcctgccacccctgctctccgatgtgtaagggctcccgctgctggggagagagttctgaggattgtcagagcctgacgcgcactgtctgtgccggtggctgtgcccgctgcaaggggccactgcccactgactgctgccatgagcagtgtgctgccggctgcacgggccccaagcactctgactgcctggcctgcctccacttcaaccacagtggcatctgtgagctgcactgcccagccctggtcacctacaacacagacacgtttgagtccatgcccaatcccgagggccggtatacattcggcgccagctgtgtcactgcctgtccctacaactacctttctacggacgtgggatcctgcaccctcgtctgccccctgcacaaccaagaggtgacagcagaggatggaacacagcggtgtgagaagtgcagcaagccctgtgcccgaggtacccactcactgcccccgaggccagctgcagttcctgtccctcngcgcatgcagcctggcccagcccaccctgtcctatccttcctcagaccctcttgggacctagtctctgccttctactctctacccctggcccccctcagccctacaagtgtccctatatcccctgtcagtgtggggaggggcccggaccctgatgctcatgtggctgttgacctgtcccggtatgaaggctgagacggccccttccccacccacccccacctcctcagtgtgctatg

SEQ ID NO: 206 - DNA, 1316 bp, Homo sapiens
  allele 1081: n= C or T
  Herstatin variant
gcagtgagcaccatggagctggcggccttgtgccgctgggggctcctcctcgccctcttgccccccggagccgcgagcacccaagtgtgcaccggcacagacatgaagctgcggctccctgccagtcccgagacccacctggacatgctccgccacctctaccagggatgccaggtggtgcagggaaacctggaactcacctacctgcccaccaatgccagcctgtccttcctgcaggatatccaggaggtgcagggctacgtgctcatcgctcacaaccaagtgaggcaggtcccactgcagaggctgcggattgtgcgaggcacccagctctttgaggacaactatgccctggccgtgctagacaatggagacccgctgaacaataccacccctgtcacaggggcctccccaggaggcctgcgggagctgcagcttcgaagcctcacagagatcttgaaaggaggggtcttgatccagcggaacccccagctctgctaccaggacacgattttgtggaaggacatcttccacaagaacaaccagctggctctcacactgatagacaccaaccgctctcgggcctgccacccctgctctccgatgtgtaagggctcccgctgctggggagagagttctgaggattgtcagagcctgacgcgcactgtctgtgccggtggctgtgcccgctgcaaggggccactgcccactgactgctgccatgagcagtgtgctgccggctgcacgggccccaagcactctgactgcctggcctgcctccacttcaaccacagtggcatctgtgagctgcactgcccagccctggtcacctacaacacagacacgtttgagtccatgcccaatcccgagggccggtatacattcggcgccagctgtgtcactgcctgtccctacaactacctttctacggacgtgggatcctgcaccctcgtctgccccctgcacaaccaagaggtgacagcagaggatggaacacagcggtgtgagaagtgcagcaagccctgtgcccgaggtacccactcactgcccccgaggccagctgcagttcctgtccctctgngcatgcagcctggcccagcccaccctgtcctatccttcctcagaccctcttgggacctagtctctgccttctactctctacccctggcccccctcagccctacaagtgtccctatatcccctgtcagtgtggggaggggcccggaccctgatgctcatgtggctgttgacctgtcccggtatgaaggctgagacggccccttccccacccacccccacctcctcagtgtgctatg

SEQ ID NO: 207 - DNA, 1316 bp, Homo sapiens
  allele 1084: n= A or C
  Herstatin variant
gcagtgagcaccatggagctggcggccttgtgccgctgggggctcctcctcgccctcttgccccccggagccgcgagcacccaagtgtgcaccggcacagacatgaagctgcggctccctgccagtcccgagacccacctggacatgctccgccacctctaccagggatgccaggtggtgcagggaaacctggaactcacctacctgcccaccaatgccagcctgtccttcctgcaggatatccaggaggtgcagggctacgtgctcatcgctcacaaccaagtgaggcaggtcccactgcagaggctgcggattgtgcgaggcacccagctctttgaggacaactatgccctggccgtgctagacaatggagacccgctgaacaataccacccctgtcacaggggcctccccaggaggcctgcgggagctgcagcttcgaagcctcacagagatcttgaaaggaggggtcttgatccagcggaacccccagctctgctaccaggacacgattttgtggaaggacatcttccacaagaacaaccagctggctctcacactgatagacaccaaccgctctcgggcctgccacccctgctctccgatgtgtaagggctcccgctgctggggagagagttctgaggattgtcagagcctgacgcgcactgtctgtgccggtggctgtgcccgctgcaaggggccactgcccactgactgctgccatgagcagtgtgctgccggctgcacgggccccaagcactctgactgcctggcctgcctccacttcaaccacagtggcatctgtgagctgcactgcccagccctggtcacctacaacacagacacgtttgagtccatgcccaatcccgagggccggtatacattcggcgccagctgtgtcactgcctgtccctacaactacctttctacggacgtgggatcctgcaccctcgtctgccccctgcacaaccaagaggtgacagcagaggatggaacacagcggtgtgagaagtgcagcaagccctgtgcccgaggtacccactcactgcccccgaggccagctgcagttcctgtccctctgcgcntgcagcctggcccagcccaccctgtcctatccttcctcagaccctcttgggacctagtctctgccttctactctctacccctggcccccctcagccctacaagtgtccctatatcccctgtcagtgtggggaggggcccggaccctgatgctcatgtggctgttgacctgtcccggtatgaaggctgagacggccccttccccacccacccccacctcctcagtgtgctatg

SEQ ID NO: 208 - DNA, 1316 bp, Homo sapiens
  allele 1086: n= G or A
  Herstatin variant
gcagtgagcaccatggagctggcggccttgtgccgctgggggctcctcctcgccctcttgccccccggagccgcgagcacccaagtgtgcaccggcacagacatgaagctgcggctccctgccagtcccgagacccacctggacatgctccgccacctctaccagggatgccaggtggtgcagggaaacctggaactcacctacctgcccaccaatgccagcctgtccttcctgcaggatatccaggaggtgcagggctacgtgctcatcgctcacaaccaagtgaggcaggtcccactgcagaggctgcggattgtgcgaggcacccagctctttgaggacaactatgccctggccgtgctagacaatggagacccgctgaacaataccacccctgtcacaggggcctccccaggaggcctgcgggagctgcagcttcgaagcctcacagagatcttgaaaggaggggtcttgatccagcggaacccccagctctgctaccaggacacgattttgtggaaggacatcttccacaagaacaaccagctggctctcacactgatagacaccaaccgctctcgggcctgccacccctgctctccgatgtgtaagggctcccgctgctggggagagagttctgaggattgtcagagcctgacgcgcactgtctgtgccggtggctgtgcccgctgcaaggggccactgcccactgactgctgccatgagcagtgtgctgccggctgcacgggccccaagcactctgactgcctggcctgcctccacttcaaccacagtggcatctgtgagctgcactgcccagccctggtcacctacaacacagacacgtttgagtccatgcccaatcccgagggccggtatacattcggcgccagctgtgtcactgcctgtccctacaactacctttctacggacgtgggatcctgcaccctcgtctgccccctgcacaaccaagaggtgacagcagaggatggaacacagcggtgtgagaagtgcagcaagccctgtgcccgaggtacccactcactgcccccgaggccagctgcagttcctgtccctctgcgcatncagcctggcccagcccaccctgtcctatccttcctcagaccctcttgggacctagtctctgccttctactctctacccctggcccccctcagccctacaagtgtccctatatcccctgtcagtgtggggaggggcccggaccctgatgctcatgtggctgttgacctgtcccggtatgaaggctgagacggccccttccccacccacccccacctcctcagtgtgctatg

SEQ ID NO: 209 - DNA, 1316 bp, Homo sapiens
  allele 1094: n= G, C, T, or A
  Herstatin variant
gcagtgagcaccatggagctggcggccttgtgccgctgggggctcctcctcgccctcttgccccccggagccgcgagcacccaagtgtgcaccggcacagacatgaagctgcggctccctgccagtcccgagacccacctggacatgctccgccacctctaccagggatgccaggtggtgcagggaaacctggaactcacctacctgcccaccaatgccagcctgtccttcctgcaggatatccaggaggtgcagggctacgtgctcatcgctcacaaccaagtgaggcaggtcccactgcagaggctgcggattgtgcgaggcacccagctctttgaggacaactatgccctggccgtgctagacaatggagacccgctgaacaataccacccctgtcacaggggcctccccaggaggcctgcgggagctgcagcttcgaagcctcacagagatcttgaaaggaggggtcttgatccagcggaacccccagctctgctaccaggacacgattttgtggaaggacatcttccacaagaacaaccagctggctctcacactgatagacaccaaccgctctcgggcctgccacccctgctctccgatgtgtaagggctcccgctgctggggagagagttctgaggattgtcagagcctgacgcgcactgtctgtgccggtggctgtgcccgctgcaaggggccactgcccactgactgctgccatgagcagtgtgctgccggctgcacgggccccaagcactctgactgcctggcctgcctccacttcaaccacagtggcatctgtgagctgcactgcccagccctggtcacctacaacacagacacgtttgagtccatgcccaatcccgagggccggtatacattcggcgccagctgtgtcactgcctgtccctacaactacctttctacggacgtgggatcctgcaccctcgtctgccccctgcacaaccaagaggtgacagcagaggatggaacacagcggtgtgagaagtgcagcaagccctgtgcccgaggtacccactcactgcccccgaggccagctgcagttcctgtccctctgcgcatgcagcctgncccagcccaccctgtcctatccttcctcagaccctcttgggacctagtctctgccttctactctctacccctggcccccctcagccctacaagtgtccctatatcccctgtcagtgtggggaggggcccggaccctgatgctcatgtggctgttgacctgtcccggtatgaaggctgagacggccccttccccacccacccccacctcctcagtgtgctatg

SEQ ID NO: 210 - DNA, 1316 bp, Homo sapiens
  allele 1124: n= G or T
  Herstatin variant
gcagtgagcaccatggagctggcggccttgtgccgctgggggctcctcctcgccctcttgccccccggagccgcgagcacccaagtgtgcaccggcacagacatgaagctgcggctccctgccagtcccgagacccacctggacatgctccgccacctctaccagggatgccaggtggtgcagggaaacctggaactcacctacctgcccaccaatgccagcctgtccttcctgcaggatatccaggaggtgcagggctacgtgctcatcgctcacaaccaagtgaggcaggtcccactgcagaggctgcggattgtgcgaggcacccagctctttgaggacaactatgccctggccgtgctagacaatggagacccgctgaacaataccacccctgtcacaggggcctccccaggaggcctgcgggagctgcagcttcgaagcctcacagagatcttgaaaggaggggtcttgatccagcggaacccccagctctgctaccaggacacgattttgtggaaggacatcttccacaagaacaaccagctggctctcacactgatagacaccaaccgctctcgggcctgccacccctgctctccgatgtgtaagggctcccgctgctggggagagagttctgaggattgtcagagcctgacgcgcactgtctgtgccggtggctgtgcccgctgcaaggggccactgcccactgactgctgccatgagcagtgtgctgccggctgcacgggccccaagcactctgactgcctggcctgcctccacttcaaccacagtggcatctgtgagctgcactgcccagccctggtcacctacaacacagacacgtttgagtccatgcccaatcccgagggccggtatacattcggcgccagctgtgtcactgcctgtccctacaactacctttctacggacgtgggatcctgcaccctcgtctgccccctgcacaaccaagaggtgacagcagaggatggaacacagcggtgtgagaagtgcagcaagccctgtgcccgaggtacccactcactgcccccgaggccagctgcagttcctgtccctctgcgcatgcagcctggcccagcccaccctgtcctatccttcctcanaccctcttgggacctagtctctgccttctactctctacccctggcccccctcagccctacaagtgtccctatatcccctgtcagtgtggggaggggcccggaccctgatgctcatgtggctgttgacctgtcccggtatgaaggctgagacggccccttccccacccacccccacctcctcagtgtgctatg

SEQ ID NO: 211 - DNA, 1316 bp, Homo sapiens
  allele 1138: n= C or A
  Herstatin variant
gcagtgagcaccatggagctggcggccttgtgccgctgggggctcctcctcgccctcttgccccccggagccgcgagcacccaagtgtgcaccggcacagacatgaagctgcggctccctgccagtcccgagacccacctggacatgctccgccacctctaccagggatgccaggtggtgcagggaaacctggaactcacctacctgcccaccaatgccagcctgtccttcctgcaggatatccaggaggtgcagggctacgtgctcatcgctcacaaccaagtgaggcaggtcccactgcagaggctgcggattgtgcgaggcacccagctctttgaggacaactatgccctggccgtgctagacaatggagacccgctgaacaataccacccctgtcacaggggcctccccaggaggcctgcgggagctgcagcttcgaagcctcacagagatcttgaaaggaggggtcttgatccagcggaacccccagctctgctaccaggacacgattttgtggaaggacatcttccacaagaacaaccagctggctctcacactgatagacaccaaccgctctcgggcctgccacccctgctctccgatgtgtaagggctcccgctgctggggagagagttctgaggattgtcagagcctgacgcgcactgtctgtgccggtggctgtgcccgctgcaaggggccactgcccactgactgctgccatgagcagtgtgctgccggctgcacgggccccaagcactctgactgcctggcctgcctccacttcaaccacagtggcatctgtgagctgcactgcccagccctggtcacctacaacacagacacgtttgagtccatgcccaatcccgagggccggtatacattcggcgccagctgtgtcactgcctgtccctacaactacctttctacggacgtgggatcctgcaccctcgtctgccccctgcacaaccaagaggtgacagcagaggatggaacacagcggtgtgagaagtgcagcaagccctgtgcccgaggtacccactcactgcccccgaggccagctgcagttcctgtccctctgcgcatgcagcctggcccagcccaccctgtcctatccttcctcagaccctcttgggacntagtctctgccttctactctctacccctggcccccctcagccctacaagtgtccctatatcccctgtcagtgtggggaggggcccggaccctgatgctcatgtggctgttgacctgtcccggtatgaaggctgagacggccccttccccacccacccccacctcctcagtgtgctatg

SEQ ID NO: 212 - DNA, 1316 bp, Homo sapiens
  allele 1193: n= C or G
  Herstatin variant
gcagtgagcaccatggagctggcggccttgtgccgctgggggctcctcctcgccctcttgccccccggagccgcgagcacccaagtgtgcaccggcacagacatgaagctgcggctccctgccagtcccgagacccacctggacatgctccgccacctctaccagggatgccaggtggtgcagggaaacctggaactcacctacctgcccaccaatgccagcctgtccttcctgcaggatatccaggaggtgcagggctacgtgctcatcgctcacaaccaagtgaggcaggtcccactgcagaggctgcggattgtgcgaggcacccagctctttgaggacaactatgccctggccgtgctagacaatggagacccgctgaacaataccacccctgtcacaggggcctccccaggaggcctgcgggagctgcagcttcgaagcctcacagagatcttgaaaggaggggtcttgatccagcggaacccccagctctgctaccaggacacgattttgtggaaggacatcttccacaagaacaaccagctggctctcacactgatagacaccaaccgctctcgggcctgccacccctgctctccgatgtgtaagggctcccgctgctggggagagagttctgaggattgtcagagcctgacgcgcactgtctgtgccggtggctgtgcccgctgcaaggggccactgcccactgactgctgccatgagcagtgtgctgccggctgcacgggccccaagcactctgactgcctggcctgcctccacttcaaccacagtggcatctgtgagctgcactgcccagccctggtcacctacaacacagacacgtttgagtccatgcccaatcccgagggccggtatacattcggcgccagctgtgtcactgcctgtccctacaactacctttctacggacgtgggatcctgcaccctcgtctgccccctgcacaaccaagaggtgacagcagaggatggaacacagcggtgtgagaagtgcagcaagccctgtgcccgaggtacccactcactgcccccgaggccagctgcagttcctgtccctctgcgcatgcagcctggcccagcccaccctgtcctatccttcctcagaccctcttgggacctagtctctgccttctactctctacccctggcccccctcagccctacaagtgtccntatatcccctgtcagtgtggggaggggcccggaccctgatgctcatgtggctgttgacctgtcccggtatgaaggctgagacggccccttccccacccacccccacctcctcagtgtgctatg

SEQ ID NO: 213 - DNA, 1316 bp, Homo sapiens
  allele 1223: n= C or T
  Herstatin variant
gcagtgagcaccatggagctggcggccttgtgccgctgggggctcctcctcgccctcttgccccccggagccgcgagcacccaagtgtgcaccggcacagacatgaagctgcggctccctgccagtcccgagacccacctggacatgctccgccacctctaccagggatgccaggtggtgcagggaaacctggaactcacctacctgcccaccaatgccagcctgtccttcctgcaggatatccaggaggtgcagggctacgtgctcatcgctcacaaccaagtgaggcaggtcccactgcagaggctgcggattgtgcgaggcacccagctctttgaggacaactatgccctggccgtgctagacaatggagacccgctgaacaataccacccctgtcacaggggcctccccaggaggcctgcgggagctgcagcttcgaagcctcacagagatcttgaaaggaggggtcttgatccagcggaacccccagctctgctaccaggacacgattttgtggaaggacatcttccacaagaacaaccagctggctctcacactgatagacaccaaccgctctcgggcctgccacccctgctctccgatgtgtaagggctcccgctgctggggagagagttctgaggattgtcagagcctgacgcgcactgtctgtgccggtggctgtgcccgctgcaaggggccactgcccactgactgctgccatgagcagtgtgctgccggctgcacgggccccaagcactctgactgcctggcctgcctccacttcaaccacagtggcatctgtgagctgcactgcccagccctggtcacctacaacacagacacgtttgagtccatgcccaatcccgagggccggtatacattcggcgccagctgtgtcactgcctgtccctacaactacctttctacggacgtgggatcctgcaccctcgtctgccccctgcacaaccaagaggtgacagcagaggatggaacacagcggtgtgagaagtgcagcaagccctgtgcccgaggtacccactcactgcccccgaggccagctgcagttcctgtccctctgcgcatgcagcctggcccagcccaccctgtcctatccttcctcagaccctcttgggacctagtctctgccttctactctctacccctggcccccctcagccctacaagtgtccctatatcccctgtcagtgtggggaggggccnggaccctgatgctcatgtggctgttgacctgtcccggtatgaaggctgagacggccccttccccacccacccccacctcctcagtgtgctatg

SEQ ID NO: 214 - DNA, 1316 bp, Homo sapiens
  allele 1249: n= G, C, or A
  Herstatin variant
gcagtgagcaccatggagctggcggccttgtgccgctgggggctcctcctcgccctcttgccccccggagccgcgagcacccaagtgtgcaccggcacagacatgaagctgcggctccctgccagtcccgagacccacctggacatgctccgccacctctaccagggatgccaggtggtgcagggaaacctggaactcacctacctgcccaccaatgccagcctgtccttcctgcaggatatccaggaggtgcagggctacgtgctcatcgctcacaaccaagtgaggcaggtcccactgcagaggctgcggattgtgcgaggcacccagctctttgaggacaactatgccctggccgtgctagacaatggagacccgctgaacaataccacccctgtcacaggggcctccccaggaggcctgcgggagctgcagcttcgaagcctcacagagatcttgaaaggaggggtcttgatccagcggaacccccagctctgctaccaggacacgattttgtggaaggacatcttccacaagaacaaccagctggctctcacactgatagacaccaaccgctctcgggcctgccacccctgctctccgatgtgtaagggctcccgctgctggggagagagttctgaggattgtcagagcctgacgcgcactgtctgtgccggtggctgtgcccgctgcaaggggccactgcccactgactgctgccatgagcagtgtgctgccggctgcacgggccccaagcactctgactgcctggcctgcctccacttcaaccacagtggcatctgtgagctgcactgcccagccctggtcacctacaacacagacacgtttgagtccatgcccaatcccgagggccggtatacattcggcgccagctgtgtcactgcctgtccctacaactacctttctacggacgtgggatcctgcaccctcgtctgccccctgcacaaccaagaggtgacagcagaggatggaacacagcggtgtgagaagtgcagcaagccctgtgcccgaggtacccactcactgcccccgaggccagctgcagttcctgtccctctgcgcatgcagcctggcccagcccaccctgtcctatccttcctcagaccctcttgggacctagtctctgccttctactctctacccctggcccccctcagccctacaagtgtccctatatcccctgtcagtgtggggaggggcccggaccctgatgctcatgtggctgttnacctgtcccggtatgaaggctgagacggccccttccccacccacccccacctcctcagtgtgctatg

SEQ ID NO: 215 - DNA, 1316 bp, Homo sapiens
  Herstatin variant
  allele 1049: n= C or T
  allele 1249: n= G, C, or A
gcagtgagcaccatggagctggcggccttgtgccgctgggggctcctcctcgccctcttgccccccggagccgcgagcacccaagtgtgcaccggcacagacatgaagctgcggctccctgccagtcccgagacccacctggacatgctccgccacctctaccagggatgccaggtggtgcagggaaacctggaactcacctacctgcccaccaatgccagcctgtccttcctgcaggatatccaggaggtgcagggctacgtgctcatcgctcacaaccaagtgaggcaggtcccactgcagaggctgcggattgtgcgaggcacccagctctttgaggacaactatgccctggccgtgctagacaatggagacccgctgaacaataccacccctgtcacaggggcctccccaggaggcctgcgggagctgcagcttcgaagcctcacagagatcttgaaaggaggggtcttgatccagcggaacccccagctctgctaccaggacacgattttgtggaaggacatcttccacaagaacaaccagctggctctcacactgatagacaccaaccgctctcgggcctgccacccctgctctccgatgtgtaagggctcccgctgctggggagagagttctgaggattgtcagagcctgacgcgcactgtctgtgccggtggctgtgcccgctgcaaggggccactgcccactgactgctgccatgagcagtgtgctgccggctgcacgggccccaagcactctgactgcctggcctgcctccacttcaaccacagtggcatctgtgagctgcactgcccagccctggtcacctacaacacagacacgtttgagtccatgcccaatcccgagggccggtatacattcggcgccagctgtgtcactgcctgtccctacaactacctttctacggacgtgggatcctgcaccctcgtctgccccctgcacaaccaagaggtgacagcagaggatggaacacagcggtgtgagaagtgcagcaagccctgtgcccgaggtacccactcactgcncccgaggccagctgcagttcctgtccctctgcgcatgcagcctggcccagcccaccctgtcctatccttcctcagaccctcttgggacctagtctctgccttctactctctacccctggcccccctcagccctacaagtgtccctatatcccctgtcagtgtggggaggggcccggaccctgatgctcatgtggctgttnacctgtcccggtatgaaggctgagacggccccttccccacccacccccacctcctcagtgtgctatg

SEQ ID NO: 216 - protein, 79 aa, Homo sapiens
  Intron 8
GTHSLPPRPAAVPVPLRMQPGPAHPVLSFLRPSWDLVSAFYSLPLAPLSPTSVPISPVSVGRGPDPDAHVAVDLSRYEG

SEQ ID NO: 217 - protein, 79 aa, Homo sapiens
  VARIANT 2: Xaa= Thr or Ser
  Intron 8 variant
GXHSLPPRPAAVPVPLRMQPGPAHPVLSFLRPSWDLVSAFYSLPLAPLSPTSVPISPVSVGRGPDPDAHVAVDLSRYEG

SEQ ID NO: 218 - protein, 79 aa, Homo sapiens
  VARIANT 5: Xaa= Leu or Pro
  Intron 8 variant
GTHSXPPRPAAVPVPLRMQPGPAHPVLSFLRPSWDLVSAFYSLPLAPLSPTSVPISPVSVGRGPDPDAHVAVDLSRYEG

SEQ ID NO: 219 - protein, 79 aa, Homo sapiens
  VARIANT 6: Xaa= Pro or Leu
  Intron 8 variant
GTHSLXPRPAAVPVPLRMQPGPAHPVLSFLRPSWDLVSAFYSLPLAPLSPTSVPISPVSVGRGPDPDAHVAVDLSRYEG

SEQ ID NO: 220 - protein, 79 aa, Homo sapiens
  VARIANT 16: Xaa= Leu or Gln
  Intron 8 variant
GTHSLPPRPAAVPVPXRMQPGPAHPVLSFLRPSWDLVSAFYSLPLAPLSPTSVPISPVSVGRGPDPDAHVAVDLSRYEG

SEQ ID NO: 221 - protein, 79 aa, Homo sapiens
  VARIANT 17: Xaa= Arg or Cys
  Intron 8 variant
GTHSLPPRPAAVPVPLXMQPGPAHPVLSFLRPSWDLVSAFYSLPLAPLSPTSVPISPVSVGRGPDPDAHVAVDLSRYEG

SEQ ID NO: 222 - protein, 79 aa, Homo sapiens
  VARIANT 18: Xaa= Met or Leu
  Intron 8 variant
GTHSLPPRPAAVPVPLRXQPGPAHPVLSFLRPSWDLVSAFYSLPLAPLSPTSVPISPVSVGRGPDPDAHVAVDLSRYEG

SEQ ID NO: 223 - protein, 79 aa, Homo sapiens; identical to SEQ ID NO: 222
  VARIANT 18: Xaa= Met or Ile
  Intron 8 variant

SEQ ID NO: 224 - protein, 79 aa, Homo sapiens
  VARIANT 21: Xaa= Gly, Asp, Ala, or Val
  Intron 8 variant
GTHSLPPRPAAVPVPLRMQPXPAHPVLSFLRPSWDLVSAFYSLPLAPLSPTSVPISPVSVGRGPDPDAHVAVDLSRYEG

SEQ ID NO: 225 - protein, 79 aa, Homo sapiens
  VARIANT 31: Xaa= Arg or Ile
  Intron 8 variant
GTHSLPPRPAAVPVPLRMQPGPAHPVLSFLXPSWDLVSAFYSLPLAPLSPTSVPISPVSVGRGPDPDAHVAVDLSRYEG

SEQ ID NO: 226 - protein, 79 aa, Homo sapiens
  VARIANT 36: Xaa= Leu or Ile
  Intron 8 variant
GTHSLPPRPAAVPVPLRMQPGPAHPVLSFLRPSWDXVSAFYSLPLAPLSPTSVPISPVSVGRGPDPDAHVAVDLSRYEG

SEQ ID NO: 227 - protein, 79 aa, Homo sapiens
  VARIANT 54: Xaa= Pro or Arg
  Intron 8 variant
GTHSLPPRPAAVPVPLRMQPGPAHPVLSFLRPSWDLVSAFYSLPLAPLSPTSVXISPVSVGRGPDPDAHVAVDLSRYEG

SEQ ID NO: 228 - protein, 79 aa, Homo sapiens
  VARIANT 64: Xaa= Pro or Leu
  Intron 8 variant
GTHSLPPRPAAVPVPLRMQPGPAHPVLSFLRPSWDLVSAFYSLPLAPLSPTSVPISPVSVGRGXDPDAHVAVDLSRYEG

SEQ ID NO: 229 - protein, 79 aa, Homo sapiens
  VARIANT 73: Xaa= Asp, His, or Asn
  Intron 8 variant
GTHSLPPRPAAVPVPLRMQPGPAHPVLSFLRPSWDLVSAFYSLPLAPLSPTSVPISPVSVGRGPDPDAHVAVXLSRYEG

SEQ ID NO: 230 - protein, 79 aa, Homo sapiens
  VARIANT 6: Xaa= Pro or Leu
  VARIANT 73: Xaa= Asp, His or Asn
  Intron 8 variant
GTHSLXPRPAAVPVPLRMQPGPAHPVLSFLRPSWDLVSAFYSLPLAPLSPTSVPISPVSVGRGPDPDAHVAVXLSRYEG

SEQ ID NO: 231 - DNA, 240 bp, Homo sapiens
  Intron 8
ggtacccactcactgcccccgaggccagctgcagttcctgtccctctgcgcatgcagcctggcccagcccaccctgtcctatccttcctcagaccctcttgggacctagtctctgccttctactctctacccctggcccccctcagccctacaagtgtccctatatcccctgtcagtgtggggaggggcccggaccctgatgctcatgtggctgttgacctgtcccggtatgaaggctga

SEQ ID NO: 232 - DNA, 240 bp, Homo sapiens
  allele 4: n= A or T
  Intron 8 variant
ggtncccactcactgcccccgaggccagctgcagttcctgtccctctgcgcatgcagcctggcccagcccaccctgtcctatccttcctcagaccctcttgggacctagtctctgccttctactctctacccctggcccccctcagccctacaagtgtccctatatcccctgtcagtgtggggaggggcccggaccctgatgctcatgtggctgttgacctgtcccggtatgaaggctga

SEQ ID NO: 233 - DNA, 240 bp, Homo sapiens
  allele 14: n= T or C
  Intron 8 variant
ggtacccactcacngcccccgaggccagctgcagttcctgtccctctgcgcatgcagcctggcccagcccaccctgtcctatccttcctcagaccctcttgggacctagtctctgccttctactctctacccctggcccccctcagccctacaagtgtccctatatcccctgtcagtgtggggaggggcccggaccctgatgctcatgtggctgttgacctgtcccggtatgaaggctga

SEQ ID NO: 234 - DNA, 240 bp, Homo sapiens
  allele 17: n= C or T
  Intron 8 variant
ggtacccactcactgcncccgaggccagctgcagttcctgtccctctgcgcatgcagcctggcccagcccaccctgtcctatccttcctcagaccctcttgggacctagtctctgccttctactctctacccctggcccccctcagccctacaagtgtccctatatcccctgtcagtgtggggaggggcccggaccctgatgctcatgtggctgttgacctgtcccggtatgaaggctga

SEQ ID NO: 235 - DNA, 240 bp, Homo sapiens
  allele 47: n= T or A
  Intron 8 variant
ggtacccactcactgcccccgaggccagctgcagttcctgtccctcngcgcatgcagcctggcccagcccaccctgtcctatccttcctcagaccctcttgggacctagtctctgccttctactctctacccctggcccccctcagccctacaagtgtccctatatcccctgtcagtgtggggaggggcccggaccctgatgctcatgtggctgttgacctgtcccggtatgaaggctga

SEQ ID NO: 236 - DNA, 240 bp, Homo sapiens
  allele 49: n= C or T
  Intron 8 variant
ggtacccactcactgcccccgaggccagctgcagttcctgtccctctgngcatgcagcctggcccagcccaccctgtcctatccttcctcagaccctcttgggacctagtctctgccttctactctctacccctggcccccctcagccctacaagtgtccctatatcccctgtcagtgtggggaggggcccggaccctgatgctcatgtggctgttnacctgtcccggtatgaaggctga

SEQ ID NO: 237 - DNA, 240 bp, Homo sapiens
  allele 52: n= A or C
  Intron 8 variant
ggtacccactcactgcccccgaggccagctgcagttcctgtccctctgcgcntgcagcctggcccagcccaccctgtcctatccttcctcagaccctcttgggacctagtctctgccttctactctctacccctggcccccctcagccctacaagtgtccctatatcccctgtcagtgtggggaggggcccggaccctgatgctcatgtggctgttgacctgtcccggtatgaaggctga

SEQ ID NO: 238 - DNA, 240 bp, Homo sapiens
  allele 54: n= G or A
  Intron 8 variant
ggtacccactcactgcccccgaggccagctgcagttcctgtccctctgcgcatncagcctggcccagcccaccctgtcctatccttcctcagaccctcttgggacctagtctctgccttctactctctacccctggcccccctcagccctacaagtgtccctatatcccctgtcagtgtggggaggggcccggaccctgatgctcatgtggctgttgacctgtcccggtatgaaggctga

SEQ ID NO: 239 - DNA, 240 bp, Homo sapiens
  allele 62: n= G, C, T, or A
  Intron 8 variant
ggtacccactcactgcccccgaggccagctgcagttcctgtccctctgcgcatgcagcctgncccagcccaccctgtcctatccttcctcagaccctcttgggacctagtctctgccttctactctctacccctggcccccctcagccctacaagtgtccctatatcccctgtcagtgtggggaggggcccggaccctgatgctcatgtggctgttgacctgtcccggtatgaaggctga

SEQ ID NO: 240 - DNA, 240 bp, Homo sapiens
  allele 92: n= G or T
  Intron 8 variant
ggtacccactcactgcccccgaggccagctgcagttcctgtccctctgcgcatgcagcctggcccagcccaccctgtcctatccttcctcanaccctcttgggacctagtctctgccttctactctctacccctggcccccctcagccctacaagtgtccctatatcccctgtcagtgtggggaggggcccggaccctgatgctcatgtggctgttnacctgtcccggtatgaaggctga

SEQ ID NO: 241 - DNA, 240 bp, Homo sapiens
  allele 106: n= C or A
  Intron 8 variant
ggtacccactcactgcccccgaggccagctgcagttcctgtccctctgcgcatgcagcctggcccagcccaccctgtcctatccttcctcagaccctcttgggacntagtctctgccttctactctctacccctggcccccctcagccctacaagtgtccctatatcccctgtcagtgtggggaggggcccggaccctgatgctcatgtggctgttgacctgtcccggtatgaaggctga

SEQ ID NO: 242 - DNA, 240 bp, Homo sapiens
  allele 161: n= C or G
  Intron 8 variant
ggtacccactcactgcccccgaggccagctgcagttcctgtccctctgcgcatgcagcctggcccagcccaccctgtcctatccttcctcagaccctcttgggacctagtctctgccttctactctctacccctggcccccctcagccctacaagtgtccntatatcccctgtcagtgtggggaggggcccggaccctgatgctcatgtggctgttgacctgtcccggtatgaaggctga

SEQ ID NO: 243 - DNA, 240 bp, Homo sapiens
  allele 191: n= C or T
  Intron 8 variant
ggtacccactcactgcccccgaggccagctgcagttcctgtccctctgcgcatgcagcctggcccagcccaccctgtcctatccttcctcagaccctcttgggacctagtctctgccttctactctctacccctggcccccctcagccctacaagtgtccctatatcccctgtcagtgtggggaggggccnggaccctgatgctcatgtggctgttgacctgtcccggtatgaaggctga

SEQ ID NO: 244 - DNA, 240 bp, Homo sapiens
  allele 217: n= G, C, or A
  Intron 8 variant
ggtacccactcactgcccccgaggccagctgcagttcctgtccctctgcgcatgcagcctggcccagcccaccctgtcctatccttcctcagaccctcttgggacctagtctctgccttctactctctacccctggcccccctcagccctacaagtgtccctatatcccctgtcagtgtggggaggggcccggaccctgatgctcatgtggctgttnacctgtcccggtatgaaggctga

SEQ ID NO: 245 - DNA, 240 bp, Homo sapiens
  allele 17: n= C or T
  allele 217: n= G, C, or A
  Intron 8 variant
ggtacccactcactgcncccgaggccagctgcagttcctgtccctctgcgcatgcagcctggcccagcccaccctgtcctatccttcctcagaccctcttgggacctagtctctgccttctactctctacccctggcccccctcagccctacaagtgtccctatatcccctgtcagtgtggggaggggcccggaccctgatgctcatgtggctgttnacctgtcccggtatgaaggctga

SEQ ID NO: 246 - protein, 730 aa, Bos taurus
MWVTRLLPVLLLQHVLLHLLLLPIAIPYAEGQKKRRNTLHEFKRSAKTTLIKEDPLLKIKTKKMNTADQCANRCIRNKGLPFTCKAFVFDKARKRCLWFPFNSMSSGVKKEFGHEFDLYENKDYIRNCIIGKGGSYKGTVSITKSGIKCQPWNSMIPHEHSFLPSSYRGKDLQENYCRNPRGEEGGPWCFTSNPEVRYEVCDIPQCSEVECMTCNGESYRGPMDHTETGKICQRWDHQTPHRHKFLPERYPDKGFDDNYCRNPDGKPRPWCYTLDPDTPWEYCAIKMCAHSTMNDTDLPMQTTECIQGQGEGYRGTINTIWNGIPCQRWDSQYPHQHDITPENFKCKDLRENYCRNPDGAESPWCFTTDPNIRVGYCSQIPKCDVSSGQDCYRGNGKNYMGSLSKTRSGLTCSMWDKNMEDLHRHIFWEPDATKLNKNYCRNPDDDAHGPWCYTGNPLIPWDYCPISRCEGDTTPTIVNLDHPVISCAKTKQLRVVNGIPTRTNVGWMVSLKYRNKHICGGSLIKESWILTARQCFPSRNKDLKDYEAWLGIHDVHGRGDEKRKQVLNVTQLVYGPEGSDLVLLKLARPAILDDFVSTIDLPNYGCTIPEKTTCSVYGWGYTGLINSDGLLRVAHLYIMGNEKCSQYHQGKVTLNESEICAGAENIVSGPCEGDYGGPLVCEQHKMRMVLGVIVPGRGCAIPNRPGIFVRVAYYAKWIHKIILTYKAPQL

SEQ ID NO: 247 - protein, 730 aa, Canis familiaris
MWVTKLLPLLVLQQLLLHLLLLPVAVPRAEGQKKRRNTLHEFKKSAKTTLIKEDPLLKIKTKKMNTADQCANRCIRNKGLPFTCKAFVFDKARKRCLWFPFNSMTSGVKKEFGHEFDLYENKDYIRNCIIGKGGSYKGTVSITKSGIKCQPWNSMIPHEHSFLPSSYRGKDLQENYCRNPRGEEGGPWCFTSNPEVRYEVCDIPQCSEVECMTCNGESYRGPMDHTESGKICQRWDHQTPHRHKFLPERYPDKGFDDNYCRNPDGKPRPWCYTLDPDTPWEYCAIKMCAHSTMNDTDVPMETTECIQGQGEGYRGTINTIWNGVPCQRWDSQYPHQHDITPENFKCKDLRENYCRNPDGAESPWCFTTDPNIRVGYCSQIPKCDVSSGQDCYRGNGKNYMGNLSKTRSGLTCSMWEKNMEDLHRHIFWEPDASKLNKNYCRNPDDDAHGPWCYTGNPLIPWDYCPIFRCEGDTTPTIVNLDHPVISCAKTKQLRVVNGIPTRTNVGWMVSLKYRNKHICGGSLIKESWILTARQCFPSRNRDLKDYEAWLGIHDVHGKGDEKRKQVLNVSQLVYGPEGSDLVLLKLARPAILDDFVSTIDLPNYGCTIPEKTTCSVYGWGYTGSINFDGLLRVAHLYIMGNEKCSQYHQGKVTLNESEICAGAENIVSGPCEGDYGGPLVCEQHKMRMVLGVIVPGRGCAIPNRPGIFVRVAYYAKWIHKIILTYKIQQS

SEQ ID NO: 248 - protein, 728 aa, Felis silvestris catus
MWVTKLLPVLLLQHVLLHLLLLPIPYAEGQKKRRNTLHEFKKSAKTTLIKEDPLLKIKTKKMNTADQCANRCIRNKGLPFTCKAFVFDKARKRCLWFPFNSMTSGVKKEFGHEFDLYENKDYIRNCIIGKGGSYKGTVSITKSGIKCQPWNSMIPHEHSFLPSSYRGKDLQENYCRNPRGEEGGPWCFTSNPEVRYEVCDIPQCSEVECMTCNGESYRGPMDHTESGKICQRWDRQTPHRHKFLPERYPDKGFDDNYCRNPDGKPRPWCYTLDPDTPWEYCAIKMCAHSTMNDTDVPMETTECIQGQGEGYRGTINSIWNGVPCQRWDSQYPHQHDITPENFKCKDLRENFCRNPDGAESPWCFTTDPNIRVGYCSQIPKCDVSSGQDCYRGNGKNYMGNLSKTRSGLTCSMWEKNMEDLHRHIFWEPDASKLNKNYCRNPDDDAHGPWCYTGNPLIPWDYCPISRCEGDTTPTIVNLDHPVISCAKTKQLRVVNGIPTRTNVGWMVSLKYRNKHICGGSLIKESWILTARQCFPSRNKDLKDYEAWLGIHDVHGRGDEKRKQVLNVSQLVYGPEGSDLVLLKLARPAVLDDFVSTIDLPNYGCTIPEKTTCSVYGWGYTGSINSDGLLRVAHLYIMGNEKCSQYHQGKVTLNESEICAGAENIVSGPCEGDYGGPLVCEQHKMRMVLGVIVPGRGCAIPNRPGIFVRVAYYAKWIHKIILTYKIPQS

SEQ ID NO: 249 - protein, 728 aa, Mus musculus
MMWGTKLLPVLLLQHVLLHLLLLHVAIPYAEGQKKRRNTLHEFKKSAKTTLTKEDPLLKIKTKKVNSADECANRCIRNRGFTFTCKAFVFDKSRKRCYWYPFNSMSSGVKKGFGHEFDLYENKDYIRNCIIGKGGSYKGTVSITKSGIKCQPWNSMIPHEHSFLPSSYRGKDLQENYCRNPRGEEGGPWCFTSNPEVRYEVCDIPQCSEVECMTCNGESYRGPMDHTESGKTCQRWDQQTPHRHKFLPERYPDKGFDDNYCRNPDGKPRPWCYTLDPDTPWEYCAIKTCAHSAVNETDVPMETTECIQGQGEGYRGTSNTIWNGIPCQRWDSQYPHKHDITPENFKCKDLRENYCRNPDGAESPWCFTTDPNIRVGYCSQIPKCDVSSGQDCYRGNGKNYMGNLSKTRSGLTCSMWDKNMEDLHRHIFWEPDASKLNKNYCRNPDDDAHGPWCYTGNPLIPWDYCPISRCEGDTTPTIVNLDHPVISCAKTKQLRVVNGIPTQTTVGWMVSLKYRNKHICGGSLIKESWVLTARQCFPARNKDLKDYEAWLGIHDVHERGEEKRKQILNISQLVYGPEGSDLVLLKLARPAILDNFVSTIDLPSYGCTIPEKTTCSIYGWGYTGLINADGLLRVAHLYIMGNEKCSQHHQGKVTLNESELCAGAEKIGSGPCEGDYGGPLICEQHKMRMVLGVIVPGRGCAIPNRPGIFVRVAYYAKWIHKVILTYKL

SEQ ID NO: 250 - protein, 728 aa, Rattus norvegicus
MMWGTKLLPVLLLQHVLLHLLLLPVTIPYAEGQKKRRNTLHEFKKSAKTTLTKEDPLVKIKTKKVNSADECANRCIRNKGFPFTCKAFVFDKSRKRCYWYPFNSMSSGVKKGFGHEFDLYENKDYIRNCIIGKGGSYKGTVSITKSGIKCQPWNSMIPHEHSFLPSSYRGKDLQENYCRNPRGEEGGPWCFTSNPEVRYEVCDIPQCSEVECMTCNGESYRGPMDHTESGKTCQRWDQQTPHRHKFLPERYPDKGFDDNYCRNPDGKPRPWCYTLDPDTPWEYCAIKMCAHSAVNETDVPMETTECIKGQGEGYRGTTNTIWNGIPCQRWDSQYPHKHDITPENFKCKDLRENYCRNPDGAESPWCFTTDPNIRVGYCSQIPKCDVSSGQDCYRGNGKNYMGNLSKTRSGLTCSMWDKNMEDLHRHIFWEPDASKLTKNYCRNPDDDAHGPWCYTGNPLVPWDYCPISRCEGDTTPTIVNLDHPVISCAKTKQLRVVNGIPTQTTVGWMVSLKYRNKHICGGSLIKESWVLTARQCFPARNKDLKDYEAWLGIHDVHERGEEKRKQILNISQLVYGPEGSDLVLLKLARPAILDNFVSTIDLPSYGCTIPEKTTCSIYGWGYTGLINADGLLRVAHLYIMGNEKCSQHHQGKVTLNESELCAGAEKIGSGPCEGDYGGPLICEQHKMRMVLGVIVPGRGCAIPNRPGIFVRVAYYAKWIHKVILTYKL

SEQ ID NO: 251 - protein, 726 aa, Gallus gallus
MWATQLLPALLLHQLLLPPITIPAAEGKGKRRNPLHDYKKTGELMLIKVNKTLEVKTKLLNTTEQCAKRCSRNKGLSFTCKAFAYDRVTKRCHWLSFNSLTNGVRKKQDHAFDLFEKKDYVRNCIIGKGAEYKGTISITKSGIQCQAWNSMIPHEHSFLPSSYRGKDLRENYCRNPRGEEGGPWCFTTSPQMRHEVCDIPLCSEVECMTCNGESYRGPMDHTESGKECQRWDLQRPHKHKFRPERYPDKGFDDNYCRNPDGKLRPWCYTLDPNTPWEFCAIKTCDVGILNSTEAVAETTTCIQGQGEGYRGTVNTIWSGIQCQRWDSQFPHQHNITPENFKCKDLRENYCRNPDGSESPWCFTTDPNIRIGYCSQIPKCDVSNEQDCYRGNGKSYMGNLSNTRIGLTCSTWDKNIEDLRRHIQIFREPDVSKLKKNYCRNPDDDFHGPWCYTDDPLIPWDYCPISRCTGDTTPTTTSLDDTVIPCASTKHLRVVNGIPTQTNEGWVVSLTYRNKHICGGTLVKEEWVLTARQCFPSRYKDLKDYKAWLGVHNIKGKGEEKHRQVRNISQLIYGPAGSDLVLLKLSRPAILTNFVEIIRLPISGCTIPEKTSCSVFGWGYTGLPNYDGLLRVANLFILGNEKCNQYLKGKITVNESEICAVAETIGAGPCERDYGGPLVCEQNRLKIVVGVIVPGRGCAIRNRPGIFVRVSYYSRWIHKIMMTYRKP

SEQ ID NO: 252 - DNA, 105 bp, Homo sapiens
atggatgcaatgaagagagggctctgctgtgtgctgctgctgtgtggagcagtcttcgtttcgcccagccaggaaatccatgcccgattcagaagaggagccaga

SEQ ID NO: 253 - protein, 35 aa, Homo sapiens
MDAMKRGLCCVLLLCGAVFVSPSQEIHARFRRGAR

SEQ ID NO: 254 - DNA, 2653 bp, Homo sapiens
atggccctgtccactgagcatcctcccgccacacagaaacccgcccagccggggccaccgaccccaccccctgcctggaaacttaaggaggccggagctgtggggagctcagagctgagatcctacaggagtccagggctggagagaaaacctctgcgaggaaagggaaggagcaagccgtgaatttaagggacgctgtgaagcaatcatggatgcaatgaagagagggctctgctgtgtgctgctgctgtgtggagcagtcttcgtttcgcccagccaggaaatccatgcccgattcagaagaggagccagatcttaccaagtgatctgcagagatgaaaaaacgcagatgatataccagcaacatcagtcatggctgcgccctgtgctcagaagcaaccgggtggaatattgctggtgcaacagtggcagggcacagtgccactcagtgcctgtcaaaagttgcagcgagccaaggtgtttcaacgggggcacctgccagcaggccctgtacttctcagatttcgtgtgccagtgccccgaaggatttgctgggaagtgctgtgaaatagataccagggccacgtgctacgaggaccagggcatcagctacaggggcacgtggagcacagcggagagtggcgccgagtgcaccaactggaacagcagcgcgttggcccagaagccctacagcgggcggaggccagacgccatcaggctgggcctggggaaccacaactactgcagaaacccagatcgagactcaaagccctggtgctacgtctttaaggcggggaagtacagctcagagttctgcagcacccctgcctgctctgagggaaacagtgactgctactttgggaatgggtcagcctaccgtggcacgcacagcctcaccgagtcgggtgcctcctgcctcccgtggaattccatgatcctgataggcaaggtttacacagcacagaaccccagtgcccaggcactgggcctgggcaaacataattactgccggaatcctgatggggatgccaagccctggtgccacgtgctgaagaaccgcaggctgacgtgggagtactgtgatgtgccctcctgctccacctgcggcctgagacagtacagccagcctcagtttcgcatcaaaggagggctcttcgccgacatcgcctcccacccctggcaggctgccatctttgccaagcacaggaggtcgcccggagagcggttcctgtgcgggggcatactcatcagctcctgctggattctctctgccgcccactgcttccaggagaggtttccgccccaccacctgacggtgatcttgggcagaacataccgggtggtccctggcgaggaggagcagaaatttgaagtcgaaaaatacattgtccataaggaattcgatgatgacacttacgacaatgacattgcgctgctgcagctgaaatcggattcgtcccgctgtgcccaggagagcagcgtggtccgcactgtgtgccttcccccggcggacctgcagctgccggactggacggagtgtgagctctccggctacggcaagcatgaggccttgtctcctttctattcggagcggctgaaggaggctcatgtcagactgtacccatccagccgctgcacatcacaacatttacttaacagaacagtcaccgacaacatgctgtgtgctggagacactcggagcggcgggccccaggcaaacttgcacgacgcctgccagggcgattcgggaggccccctggtgtgtctgaacgatggccgcatgactttggtgggcatcatcagctggggcctgggctgtggacagaaggatgtcccgggtgtgtacaccaaggttaccaactacctagactggattcgtgacaacatgcgaccgtgaccaggaacacccgactcctcaaaagcaaatgagatcccgcctcttcttcttcagaagacactgcaaaggcgcagtgcttctctacagacttctccagacccaccacaccgcagaagcgggacgagaccctacaggagagggaagagtgcattttcccagatacttcccattttggaagttttcaggacttggtctgatttcaggatactctgtcagatgggaagacatgaatgcacactagcctctccaggaatgcctcctccctgggcagaaagtggccatgccaccctgttttcagctaaagcccaacctcctgacctgtcaccgtgagcagctttggaaacaggaccacaaaaatgaaagcatgtctcaatagtaaaagataacaagatctttcaggaaagacggattgcattagaaatagacagtatatttatagtcacaagagcccagcagggcctcaaagttggggcaggctggctggcccgtcatgttcctcaaaagcacccttgacgtcaagtctccttcccctttccccactccctggctctcagaaggtattccttttgtgtacagtgtgtaaagtgtaaatcctttttctttataaactttagagtagcatgagagaattgtatcatttgaacaactaggcttcagcatatttatagcaatccatgttagtttttactttctgttgccacaaccctgttttatactgtacttaataaattcagatatatttttcacagtttttcc

SEQ ID NO: 255 - protein, 562 aa, Homo sapiens
MDAMKRGLCCVLLLCGAVFVSPSQEIHARFRRGARSYQVICRDEKTQMIYQQHQSWLRPVLRSNRVEYCWCNSGRAQCHSVPVKSCSEPRCFNGGTCQQALYFSDFVCQCPEGFAGKCCEIDTRATCYEDQGISYRGTWSTAESGAECTNWNSSALAQKPYSGRRPDAIRLGLGNHNYCRNPDRDSKPWCYVFKAGKYSSEFCSTPACSEGNSDCYFGNGSAYRGTHSLTESGASCLPWNSMILIGKVYTAQNPSAQALGLGKHNYCRNPDGDAKPWCHVLKNRRLTWEYCDVPSCSTCGLRQYSQPQFRIKGGLFADIASHPWQAAIFAKHRRSPGERFLCGGILISSCWILSAAHCFQERFPPHHLTVILGRTYRVVPGEEEQKFEVEKYIVHKEFDDDTYDNDIALLQLKSDSSRCAQESSVVRTVCLPPADLQLPDWTECELSGYGKHEALSPFYSERLKEAHVRLYPSSRCTSQHLLNRTVTDNMLCAGDTRSGGPQANLHDACQGDSGGPLVCLNDGRMTLVGIISWGLGCGQKDVPGVYTKVTNYLDWIRDNMRP

SEQ ID NO: 256 - DNA, 105 bp, Homo sapiens
  allele 101: n= C or A
atggatgcaatgaagagagggctctgctgtgtgctgctgctgtgtggagcagtcttcgtttcgcccagccaggaaatccatgcccgattcagaagaggagncaga

SEQ ID NO: 257 - protein, 35 aa, Homo sapiens
  VARIANT 34: Xaa= A or D
MDAMKRGLCCVLLLCGAVFVSPSQEIHARFRRGXR

SEQ ID NO: 258 - protein, 32 aa, Mus musculus
MKRELLCVLLLCGLAFPLPDQGIHGRFRRGAR

SEQ ID NO: 259 - protein, 32 aa, Rattus norvegicus
MKGELLCVLLLCGVAFTLPDQGIHRRFRRGAR

SEQ ID NO: 260 - protein, 36 aa, Bos taurus
MMSAMKTEFLCVLLLCGAVFTSPSQETYRRLRRGAR

SEQ ID NO: 261 - protein, 35 aa, Pongo pygmaeus
MNAMKRGLCCVLLLCGAVFALPSQEIHARVRRGAR

SEQ ID NO: 262 - protein, 35 aa, Sus scrofa
MYALKRELWCVLLLCGAICTSPSQETHRRLRRGVR

SEQ ID NO: 263 - protein, 38 aa, Gallus gallus
MWKTLRMKGKLLSLLLLVGVIKTAQCQGTHMRYKRGAR

SEQ ID NO: 264 - protein, 36 aa, Desmodus rotundus
MVNTMKTKLLCVLLLCGAVFSLPRQETYRQLARGSR

SEQ ID NO: 265 - protein, 36 aa, Oryctolagus cuniculus
MWNPGVRELLCVLLLCGAACARPSQEAPARVRRGAR

SEQ ID NO: 266 - DNA, 27 bp, Artificial sequence
  Gly4Ser Linker
ccatgggcggcggcggctctgccatgg

SEQ ID NO: 267 - DNA, 42 bp, Artificial sequence
  (Gly4Ser)2 Linker
ccatgggcggcggcggctctggcggcggcggctctgccatgg

SEQ ID NO: 268 - DNA, 75 bp, Artificial sequence
  (Ser4Gly)4 Linker
ccatggcctcgtcgtcgtcgggctcgtcgtcgtcgggctcgtcgtcgtcgggctcgtcgtcgtcgggcgccatgg

SEQ ID NO: 269 - DNA, 45 bp, Artificial sequence
  (Ser4Gly)2 Linker
ccatggcctcgtcgtcgtcgggctcgtcgtcgtcgggcgccatgg

SEQ ID NO: 270 - protein, 8 aa, Artificial sequence
  AlaAlaProAla Linker
AAPAAAPA

SEQ ID NO: 271 - DNA, 3915 bp, Homo sapiens
  CD45
atgtatttgtggcttaaactcttggcatttggctttgcctttctggacacagaagtatttgtgacagggcaaagcccaacaccttcccccactggattgactacagcaaagatgcccagtgttccactttcaagtgaccccttacctactcacaccactgcattctcacccgcaagcacctttgaaagagaaaatgacttctcagagaccacaacttctcttagtccagacaatacttccacccaagtatccccggactctttggataatgctagtgcttttaataccacaggtgtttcatcagtacagacgcctcaccttcccacgcacgcagactcgcagacgccctctgctggaactgacacgcagacattcagcggctccgccgccaatgcaaaactcaaccctaccccaggcagcaatgctatctcagatgtcccaggagagaggagtacagccagcacctttcctacagacccagtttccccattgacaaccaccctcagccttgcacaccacagctctgctgccttacctgcacgcacctccaacaccaccatcacagcgaacacctcagatgcctaccttaatgcctctgaaacaaccactctgagcccttctggaagcgctgtcatttcaaccacaacaatagctactactccatctaagccaacatgtgatgaaaaatatgcaaacatcactgtggattacttatataacaaggaaactaaattatttacagcaaagctaaatgttaatgagaatgtggaatgtggaaacaatacttgcacaaacaatgaggtgcataaccttacagaatgtaaaaatgcgtctgtttccatatctcataattcatgtactgctcctgataagacattaatattagatgtgccaccaggggttgaaaagtttcagttacatgattgtacacaagttgaaaaagcagatactactatttgtttaaaatggaaaaatattgaaacctttacttgtgatacacagaatattacctacagatttcagtgtggtaatatgatatttgataataaagaaattaaattagaaaaccttgaacccgaacatgagtataagtgtgactcagaaatactctataataaccacaagtttactaacgcaagtaaaattattaaaacagattttgggagtccaggagagcctcagattattttttgtagaagtgaagctgcacatcaaggagtaattacctggaatccccctcaaagatcatttcataattttaccctctgttatataaaagagacagaaaaagattgcctcaatctggataaaaacctgatcaaatatgatttgcaaaatttaaaaccttatacgaaatatgttttatcattacatgcctacatcattgcaaaagtgcaacgtaatggaagtgctgcaatgtgtcatttcacaactaaaagtgctcctccaagccaggtctggaacatgactgtctccatgacatcagataatagtatgcatgtcaagtgtaggcctcccagggaccgtaatggcccccatgaacgttaccatttggaagttgaagctggaaatactctggttagaaatgagtcgcataagaattgcgatttccgtgtaaaagatcttcaatattcaacagactacacttttaaggcctattttcacaatggagactatcctggagaaccctttattttacatcattcaacatcttataattctaaggcactgatagcatttctggcatttctgattattgtgacatcaatagccctgcttgttgttctctacaaaatctatgatctacataagaaaagatcctgcaatttagatgaacagcaggagcttgttgaaagggatgatgaaaaacaactgatgaatgtggagccaatccatgcagatattttgttggaaacttataagaggaagattgctgatgaaggaagaccttttctggctgaatttcagagcatcccgcgggtgttcagcaagtttcctataaaggaagctcgaaagccctttaaccagaataaaaaccgttatgttgacattcttccttatgattataaccgtgttgaactctctgagataaacggagatgcagggtcaaactacataaatgccagctatattgatggtttcaaagaacccaggaaatacattgctgcacaaggtcccagggatgaaactgttgatgatttctggaggatgatttgggaacagaaagccacagttattgtcatggtcactcgatgtgaagaaggaaacaggaacaagtgtgcagaatactggccgtcaatggaagagggcactcgggcttttggagatgttgttgtaaagatcaaccagcacaaaagatgtccagattacatcattcagaaattgaacattgtaaataaaaaagaaaaagcaactggaagagaggtgactcacattcagttcaccagctggccagaccacggggtgcctgaggatcctcacttgctcctcaaactgagaaggagagtgaatgccttcagcaatttcttcagtggtcccattgtggtgcactgcagtgctggtgttgggcgcacaggaacctatatcggaattgatgccatgctagaaggcttggaagccgagaacaaagtggatgtttatggttatgttgtcaagctaaggcgacagagatgcctgatggttcaagtagaggcccagtacatcttgatccatcaggctttggtggaatacaatcagtttggagaaacagaagtgaatttgtctgaattacatccatatctacataacatgaagaaaagggatccacccagtgagccgtctccactagaggctgaattccagagacttccttcatataggagctggaggacacagcacattggaaatcaagaagaaaataaaagtaaaaacaggaattctaatgtcatcccatatgactataacagagtgccacttaaacatgagctggaaatgagtaaagagagtgagcatgattcagatgaatcctctgatgatgacagtgattcagaggaaccaagcaaatacatcaatgcatcttttataatgagctactggaaacctgaagtgatgattgctgctcagggaccactgaaggagaccattggtgacttttggcagatgatcttccaaagaaaagtcaaagttattgttatgctgacagaactgaaacatggagaccaggaaatctgtgctcagtactggggagaaggaaagcaaacatatggagatattgaagttgacctgaaagacacagacaaatcttcaacttatacccttcgtgtctttgaactgagacattccaagaggaaagactctcgaactgtgtaccagtaccaatatacaaactggagtgtggagcagcttcctgcagaacccaaggaattaatctctatgattcaggtcgtcaaacaaaaacttccccagaagaattcctctgaagggaacaagcatcacaagagtacacctctactcattcactgcagggatggatctcagcaaacgggaatattttgtgctttgttaaatctcttagaaagtgcggaaacagaagaggtagtggatatttttcaagtggtaaaagctctacgcaaagctaggctaggcatggtttccacattcgagcaatatcaattcctatatgacgtcattgccagcacctaccctgctcagaatggacaagtaaagaaaaacaaccatcaagaagataaaattgaatttgataatgaagtggacaaagtaaagcaggatgctaattgtgttaatccacttggtgccccagaaaagctccctgaagcaaaggaacaggctgaaggttctgaacccacgagtggcactgaggggccagaacattctgtcaatggtcctgcaagtccagctttaaatcaaggttcatag

SEQ ID NO: 272 - protein, 1304 aa, Homo sapiens
  CD45
MYLWLKLLAFGFAFLDTEVFVTGQSPTPSPTGLTTAKMPSVPLSSDPLPTHTTAFSPASTFERENDFSETTTSLSPDNTSTQVSPDSLDNASAFNTTGVSSVQTPHLPTHADSQTPSAGTDTQTFSGSAANAKLNPTPGSNAISDVPGERSTASTFPTDPVSPLTTTLSLAHHSSAALPARTSNTTITANTSDAYLNASETTTLSPSGSAVISTTTIATTPSKPTCDEKYANITVDYLYNKETKLFTAKLNVNENVECGNNTCTNNEVHNLTECKNASVSISHNSCTAPDKTLILDVPPGVEKFQLHDCTQVEKADTTICLKWKNIETFTCDTQNITYRFQCGNMIFDNKEIKLENLEPEHEYKCDSEILYNNHKFTNASKIIKTDFGSPGEPQIIFCRSEAAHQGVITWNPPQRSFHNFTLCYIKETEKDCLNLDKNLIKYDLQNLKPYTKYVLSLHAYIIAKVQRNGSAAMCHFTTKSAPPSQVWNMTVSMTSDNSMHVKCRPPRDRNGPHERYHLEVEAGNTLVRNESHKNCDFRVKDLQYSTDYTFKAYFHNGDYPGEPFILHHSTSYNSKALIAFLAFLIIVTSIALLVVLYKIYDLHKKRSCNLDEQQELVERDDEKQLMNVEPIHADILLETYKRKIADEGRLFLAEFQSIPRVFSKFPIKEARKPFNQNKNRYVDILPYDYNRVELSEINGDAGSNYINASYIDGFKEPRKYIAAQGPRDETVDDFWRMIWEQKATVIVMVTRCEEGNRNKCAEYWPSMEEGTRAFGDVVVKINQHKRCPDYIIQKLNIVNKKEKATGREVTHIQFTSWPDHGVPEDPHLLLKLRRRVNAFSNFFSGPIVVHCSAGVGRTGTYIGIDAMLEGLEAENKVDVYGYVVKLRRQRCLMVQVEAQYILIHQALVEYNQFGETEVNLSELHPYLHNMKKRDPPSEPSPLEAEFQRLPSYRSWRTQHIGNQEENKSKNRNSNVIPYDYNRVPLKHELEMSKESEHDSDESSDDDSDSEEPSKYINASFIMSYWKPEVMIAAQGPLKETIGDFWQMIFQRKVKVIVMLTELKHGDQEICAQYWGEGKQTYGDIEVDLKDTDKSSTYTLRVFELRHSKRKDSRTVYQYQYTNWSVEQLPAEPKELISMIQVVKQKLPQKNSSEGNKHHKSTPLLIHCRDGSQQTGIFCALLNLLESAETEEVVDIFQVVKALRKARPGMVSTFEQYQFLYDVIASTYPAQNGQVKKNNHQEDKIEFDNEVDKVKQDANCVNPLGAPEKLPEAKEQAEGSEPTSGTEGPEHSVNGPASPALNQGS

SEQ ID NO: 273 - DNA, 3915 bp, Homo sapiens
  allele 148: n = a or g
  allele 153: n = c or a
  allele 171: n = c, g, or t
  allele 361: n = g or c
  allele 560: n = t or a
  allele 571: n = a or g
  allele 979: n = g or a
  allele 1262: n = c or t
  allele 1704: n = t or a
  CD45 Variant
atgtatttgtggcttaaactcttggcatttggctttgcctttctggacacagaagtatttgtgacagggcaaagcccaacaccttcccccactggattgactacagcaaagatgcccagtgttccactttcaagtgaccccttacctnctcanaccactgcattctcaccngcaagcacctttgaaagagaaaatgacttctcagagaccacaacttctcttagtccagacaatacttccacccaagtatccccggactctttggataatgctagtgcttttaataccacaggtgtttcatcagtacagacgcctcaccttcccacgcacgcagactcgcagacgccctctgctggaactnacacgcagacattcagcggctccgccgccaatgcaaaactcaaccctaccccaggcagcaatgctatctcagatgtcccaggagagaggagtacagccagcacctttcctacagacccagtttccccattgacaaccaccctcagccttgcacaccacagctctgctgccttacctgcacgcacctccaacaccaccancacagcgaacncctcagatgcctaccttaatgcctctgaaacaaccactctgagcccttctggaagcgctgtcatttcaaccacaacaatagctactactccatctaagccaacatgtgatgaaaaatatgcaaacatcactgtggattacttatataacaaggaaactaaattatttacagcaaagctaaatgttaatgagaatgtggaatgtggaaacaatacttgcacaaacaatgaggtgcataaccttacagaatgtaaaaatgcgtctgtttccatatctcataattcatgtactgctcctgataagacattaatattagatgtgccaccaggggttgaaaagtttcagttacatgattgtacacaagttgaaaaagcagatactactatttgtttaaaatggaaaaatattnaaacctttacttgtgatacacagaatattacctacagatttcagtgtggtaatatgatatttgataataaagaaattaaattagaaaaccttgaacccgaacatgagtataagtgtgactcagaaatactctataataaccacaagtttactaacgcaagtaaaattattaaaacagattttgggagtccaggagagcctcagattattttttgtagaagtgaagctgcacatcaaggagtaattacctggaatccccctcaaagatcatttcataattttancctctgttatataaaagagacagaaaaagattgcctcaatctggataaaaacctgatcaaatatgatttgcaaaatttaaaaccttatacgaaatatgttttatcattacatgcctacatcattgcaaaagtgcaacgtaatggaagtgctgcaatgtgtcatttcacaactaaaagtgctcctccaagccaggtctggaacatgactgtctccatgacatcagataatagtatgcatgtcaagtgtaggcctcccagggaccgtaatggcccccatgaacgttaccatttggaagttgaagctggaaatactctggttagaaatgagtcgcataagaattgcgatttccgtgtaaaagatcttcaatattcaacagactacacttttaaggcctattttcacaatggagactatcctggagaaccctttattttacatcantcaacatcttataattctaaggcactgatagcatttctggcatttctgattattgtgacatcaatagccctgcttgttgttctctacaaaatctatgatctacataagaaaagatcctgcaatttagatgaacagcaggagcttgttgaaagggatgatgaaaaacaactgatgaatgtggagccaatccatgcagatattttgttggaaacttataagaggaagattgctgatgaaggaagaccttttctggctgaatttcagagcatcccgcgggtgttcagcaagtttcctataaaggaagctcgaaagccctttaaccagaataaaaaccgttatgttgacattcttccttatgattataaccgtgttgaactctctgagataaacggagatgcagggtcaaactacataaatgccagctatattgatggtttcaaagaacccaggaaatacattgctgcacaaggtcccagggatgaaactgttgatgatttctggaggatgatttgggaacagaaagccacagttattgtcatggtcactcgatgtgaagaaggaaacaggaacaagtgtgcagaatactggccgtcaatggaagagggcactcgggcttttggagatgttgttgtaaagatcaaccagcacaaaagatgtccagattacatcattcagaaattgaacattgtaaataaaaaagaaaaagcaactggaagagaggtgactcacattcagttcaccagctggccagaccacggggtgcctgaggatcctcacttgctcctcaaactgagaaggagagtgaatgccttcagcaatttcttcagtggtcccattgtggtgcactgcagtgctggtgttgggcgcacaggaacctatatcggaattgatgccatgctagaaggcttggaagccgagaacaaagtggatgtttatggttatgttgtcaagctaaggcgacagagatgcctgatggttcaagtagaggcccagtacatcttgatccatcaggctttggtggaatacaatcagtttggagaaacagaagtgaatttgtctgaattacatccatatctacataacatgaagaaaagggatccacccagtgagccgtctccactagaggctgaattccagagacttccttcatataggagctggaggacacagcacattggaaatcaagaagaaaataaaagtaaaaacaggaattctaatgtcatcccatatgactataacagagtgccacttaaacatgagctggaaatgagtaaagagagtgagcatgattcagatgaatcctctgatgatgacagtgattcagaggaaccaagcaaatacatcaatgcatcttttataatgagctactggaaacctgaagtgatgattgctgctcagggaccactgaaggagaccattggtgacttttggcagatgatcttccaaagaaaagtcaaagttattgttatgctgacagaactgaaacatggagaccaggaaatctgtgctcagtactggggagaaggaaagcaaacatatggagatattgaagttgacctgaaagacacagacaaatcttcaacttatacccttcgtgtctttgaactgagacattccaagaggaaagactctcgaactgtgtaccagtaccaatatacaaactggagtgtggagcagcttcctgcagaacccaaggaattaatctctatgattcaggtcgtcaaacaaaaacttccccagaagaattcctctgaagggaacaagcatcacaagagtacacctctactcattcactgcagggatggatctcagcaaacgggaatattttgtgctttgttaaatctcttagaaagtgcggaaacagaagaggtagtggatatttttcaagtggtaaaagctctacgcaaagctaggctaggcatggtttccacattcgagcaatatcaattcctatatgacgtcattgccagcacctaccctgctcagaatggacaagtaaagaaaaacaaccatcaagaagataaaattgaatttgataatgaagtggacaaagtaaagcaggatgctaattgtgttaatccacttggtgccccagaaaagctccctgaagcaaaggaacaggctgaaggttctgaacccacgagtggcactgaggggccagaacattctgtcaatggtcctgcaagtccagctttaaatcaaggttcatag

SEQ ID NO: 274 - protein, 1304 aa, Homo sapiens
  VARIANT 50: Xaa = Thr or Ala
  VARIANT 51: Xaa = His or Gln
  VARIANT 121: Xaa = Asp or His
  VARIANT 187: Xaa = Ile or Asn
  VARIANT 191: Xaa = Thr or Ile
  VARIANT 284: Xaa = Asn, Ile, or Leu
  VARIANT 327: Xaa = Glu or Lys
  VARIANT 421: Xaa = Thr or Ile
  VARIANT 568: Xaa = His or Gln
  VARIANT 650: Xaa = Leu or Pro
  VARIANT 1207: Xaa = Pro or Leu
  VARIANT 1283: Xaa = Ser or Arg
  CD45 Variant
MYLWLKLLAFGFAFLDTEVFVTGQSPTPSPTGLTTAKMPSVPLSSDPLPXXTTAFSPASTFERENDFSETTTSLSPDNTSTQVSPDSLDNASAFNTTGVSSVQTPHLPTHADSQTPSAGTXTQTFSGSAANAKLNPTPGSNAISDVPGERSTASTFPTDPVSPLTTTLSLAHHSSAALPARTSNTTITANXSDAYLNASETTTLSPSGSAVISTTTIATTPSKPTCDEKYANITVDYLYNKETKLFTAKLNVNENVECGNNTCTNNEVHNLTECKNASVSISHXSCTAPDKTLILDVPPGVEKFQLHDCTQVEKADTTICLKWKNIXTFTCDTQNITYRFQCGNMIFDNKEIKLENLEPEHEYKCDSEILYNNHKFTNASKIIKTDFGSPGEPQIIFCRSEAAHQGVITWNPPQRSFHNFXLCYIKETEKDCLNLDKNLIKYDLQNLKPYTKYVLSLHAYIIAKVQRNGSAAMCHFTTKSAPPSQVWNMTVSMTSDNSMHVKCRPPRDRNGPHERYHLEVEAGNTLVRNESHKNCDFRVKDLQYSTDYTFKAYFHNGDYPGEPFILHXSTSYNSKALIAFLAFLIIVTSIALLVVLYKIYDLHKKRSCNLDEQQELVERDDEKQLMNVEPIHADILLETYKRKIADEGRXFLAEFQSIPRVFSKFPIKEARKPFNQNKNRYVDILPYDYNRVELSEINGDAGSNYINASYIDGFKEPRKYIAAQGPRDETVDDFWRMIWEQKATVIVMVTRCEEGNRNKCAEYWPSMEEGTRAFGDVVVKINQHKRCPDYIIQKLNIVNKKEKATGREVTHIQFTSWPDHGVPEDPHLLLKLRRRVNAFSNFFSGPIVVHCSAGVGRTGTYIGIDAMLEGLEAENKVDVYGYVVKLRRQRCLMVQVEAQYILIHQALVEYNQFGETEVNLSELHPYLHNMKKRDPPSEPSPLEAEFQRLPSYRSWRTQHIGNQEENKSKNRNSNVIPYDYNRVPLKHELEMSKESEHDSDESSDDDSDSEEPSKYINASFIMSYWKPEVMIAAQGPLKETIGDFWQMIFQRKVKVIVMLTELKHGDQEICAQYWGEGKQTYGDIEVDLKDTDKSSTYTLRVFELRHSKRKDSRTVYQYQYTNWSVEQLPAEPKELISMIQVVKQKLPQKNSSEGNKHHKSTPLLIHCRDGSQQTGIFCALLNLLESAETEEVVDIFQVVKALRKARXGMVSTFEQYQFLYDVIASTYPAQNGQVKKNNHQEDKIEFDNEVDKVKQDANCVNPLGAPEKLPEAKEQAEGSEPTXGTEGPEHSVNGPASPALNQGS

SEQ ID NO: 275 - protein, 1291 aa, Mus musculus
  CD45
MGLWLKLLAFGFALLDTEVFVTGQTPTPSDELSTTENALLLPQSDPLPARTTESTPPSISERGNGSSETTYHPGVLSTLLPHLSPQPDSQTPSAGGADTQTFSSQADNPTLTPAPGGGTDPPGVPGERTVPGTIPADTAFPVDTPSLARNSSAASPTHTSNVSTTDISSGASLTTLTPSTLGLASTDPPSTTIATTTKQTCAAMFGNITVNYTYESSNQTFKADLKDVQNAKCGNEDCENVLNNLEECSQIKNISVSNDSCAPATTIDLYVPPGTDKFSLHDCTPKEKANTSICLEWKTKNLDFRKCNSDNISYVLHCEPENNTKCIRRNTFIPERCQLDNLRAQTNYTCVAEILYRGVKLVKNVINVQTDLGIPETPKPSCGDPAARKTLVSWPEPVSKPESASKPHGYVLCYKNNSEKCKSLPNNVTSFEVESLKPYKYYEVSLLAYVNGKIQRNGTAEKCNFHTKADRPDKVNGMKTSRPTDNSINVTCGPPYETNGPKTFYILVVRSGGSFVTNTTKTNCQFYGDNLYYSTDYEFLVSFHNGVYEGDSVIRSESTNFNAKALIIFLVFLIIVTSIALLVVLYKSYDLRKKRSSNLDEQQELVERDDEKQLMDVEPIHSDILLETYKRKIADEGRLFLAEFQSIPRVFSKFPIKDARKPHNQNKNRYVDILPYDYNRVELSEINGDAGSTYINASYIDGFKEPRKYIAAQGPRDETVDDFWRMIWEQKATVIVMVTRCEEGNRNKCAEYWPSMEEGTRAFKDIVVTINDHKRCPDYIIQKLNVAHKKEKATGREVTHIQFTSWPDHGVPEDPHLLLKLRRRVNAFSNFFSGPIVVHCSAGVGRTGTYIGIDAMLEGLEAEGKVDVYGYVVKLRRQRCLMVQVEAQYILIHQALVEYNQFGETQVNLSELHSCLHNMKKRDPPSDPSPREAEYQRLPSYRSWRTQHIGNQGENKKKKRNSNVVPYDFNRVPLKHELEMSKESEPESDESSDDDSDSEETSKYINASFVMSYWKPEMMIAAQGPLKETIGDFWQMIFQRKVKVIVMLTELVNGDQEVCAQYWGEGKQTYGDMEVEMKDTNRASAYTLRTFELRHSKRKEPRTVYQYQCTTWKGEELPAEPKDLVSMIQDLKQKLPKASPEGMKYHKHASILVHCRDGSQQTGLFCALFNLLESAETEDVVDVFQVVKSLRKARPGVVCSYEQYQFLYDIIASIYPAQNGQVKKTNSQDKIEFHNEVDGGKQDANCVRPDGPLNKAQEDSRGVGTPEPTNSAEEPEHAANGSASPAPTQSS

SEQ ID NO: 276 - protein, 1255 aa, Rattus norvegicus
  CD45
VFVTGQGTTDDGLDTTEIVLLPQTDPLPARTTEFTPPSISERGNGSSETTYLPGFSSTLMPHLTPQPDSQTPSARGADTQTLSSQADLTTLTAAPSGETDPPGVPEESTVPETFPGGTPILARNSTAPSPTHTSNVSTTDISSGANLTTPAPSTLGFASNTTTSTEIATPQTKPSCDEKFGNVTVRYIYDDSSKNFNANLEGDKKPKCEYTDCEKELKNLPECSQKNVTLSNGSCTPDKIINLDVPPGTHNFNLTNCTPDIEANTSICLEWKIKNKFTCDIQKISYNFRCTPEMKTFALDKHGTLWLHNLTVRTNYTCAAEVLYNNVILLKQDRRVQTDFGTPEMLPHVQCKNSTNSTTLVSWAEPASKHHGYILCYKKTPSEKCENLANDVNSFEVKNLRPYTEYTVSLFAYVIGRVQRNGPAKDCNFRTKAARPGKVNGMKTSRASDNSINVTCNSPYEINGPEARYILEVKSGGSLVKTFNQSTCKFVVDNLYYSTDYEFLVYFYNGEYLGDPEIKPQSTSYNSKALIIFLVFLIIVTSIALLVVLYKIYDLRKKRSSNLDEQQELVERDEEKQLINVDPIHSDLLLETYKRKIADEGRLFLAEFQSIPRVFSKFPIKDARKSQNQNKNRYVDILPYDYNRVELSEINGDAGSTYINASYIDGFKEPRKYIAAQGPRDETVDDFWKMIWEQKATVIVMVTRCEEGNRNKCAEYWPCMEEGTRTFRDVVVTINDHKRCPDYIIQKLSIAHKKEKATGREVTHIQFTSWPDHGVPEDPHLLLKLRRRVNAFSNFFSGPIVVHCSAGVGRTGTYIGIDAMLESLEAEGKVDVYGYVVNLRRQRCLMVQVEAQYILIHQALVEYNQFGETEVNLSELHSCLQNLKKRDPPSDPSPLEAEYQRLPSYRSWRTQHIGNQEENKKKNRSSNVVPYDFNRVPLKHELEMSKESEAESDESSDEDSDSEETSKYINASFVMSYWKPEMMIAAQGPLKETIGDFWQMIFQRKVKVIVMLTELMSGDQEVCAQYWGEGKQTYGDMEVMLKDTNKSSAYILRAFELRHSKRKEPRTVYQYQCTTWKGEELPAEPKDLVTLIQNIKQKLPKSGSEGMKYHKHASILVHCRDGSQQTGLFCALFNLLESAETEDVVDVFQVVKSLRKARPGMVGSFEQYQFLYDIMASIYPTQNGQVKKANSQDKIEFHNEVDGAKQDANCVQPADPLNKAQEDSKEVGASEPASGSEEPEHSANGPMSPALTPSS

SEQ ID NO: 277 - protein, 1237 aa, Gallus gallus
  CD45
MFLCLKLLAFGVAFLCQDAFAQAGNDNLTSASSLSSTLPTPTRSTSFSPPSTTAGVQPASTGASPTASTHLSTHSGSGPTTGLGHLQHSSPAALTTRTLTAFHQTVSDYYSSTSLHNTTSPVITPASTETIPTSTIESATTTEEPCDNSIDYGNIEEKNNSAEVTLKNLKENRIYDILLEDGKSLSVNASNNIVMLNWCRRYTVQSRSCKVMYLTIPPDEKRYTFGAKSIGNDNATLRLNSLCIDCEDVCSNVTVSCKTNSINSGGTGNLTGSYELMKHDINADNITILSLSSDSEYLCRVTVRFFEKNFTKEVNITTDYDAPKAPENLTVHPTDRNVTVTWMKPTGTLEKHIDGYTVECNNTSQNVNRNETSFTCGDLEPYSTGSVSVRAFKKSKYKNKNFEGEKVNGSFQTKPAKPENVTDFKLTLLADNTVKVACRSQKVYGNETKFKLSWNSSSNSGENQRKNECNFTVRDLSYLTKYTFKISVFNGVYTGDSVCEEIYTRYNSRALIIFLVFLIVVTSIALLLVLYKIYDLHQKKLSNSSEVISLVAVKDDERQLLNIEPIPSEKLLETYKRKIADEGRLFLDEFQSIPRIFTKFPMKEAKRSHNQNKNRYIDILPYDHNRVELSEIPGDPGSDYINASYIDGFKEPRKYIAAQGPKDETTDDFWRMIWEQKATIIVMVTRCEEGNRNKCAQYGPSMENGSATYGDITVKINESKICPDYIIQKLHITNGRERTSGRDVTHIQFTSWPDHGVPEDPHLLLKLRRRVNALSNFFSGPIVVHCSAGVGRTGTYIGIDAMLEGLDAEGRVDVYGYVVKLRRQRCLMVQVESQYILIHQALVEYHQYGETEVSLSELHSYLNNLKRKDPPSEPSLLEAKFQRLPSYKGWRTQNTGNREENKNKNRSANTIPYDFNRVPIRSEEEQSKEGEHDSEDSSDEDSDCEESSRYINASFITGYWGPKAMIATQGPLQETISDFWQMVFQRKVKVIVMLTELKEGDQELCAQYWGEGRQTYDDIEVQVTDVNCCPSYTIRAFDVTHLKRKETQKVYQYQYHKWNGLDVPEDPKDLVDMILSLKQKVPSRPASEDSRNSRSVPFVIHCCDGSQQTWCVLCLMTLLESAETEEVIDVFQVVKALRRSRLGVVSTFEQYQFLYDTIARTYPAQNGQIKNIHQEDKVEFCNEVEKKDQESDLITIDLTPSTPEENDAPECCDDFKAADTNKGTESSTNGPTTPVLT

SEQ ID NO: 278 - protein, 1251 aa, Canis familiaris
  CD45
MYLWLKLLAFGFAFLDTGVFVTGKEPTQAGSGLNSTEKPSAPGDPLPTRTTAFSLPSISERENYSSETTPPLSPDSTSTEESRNSLDNANSHDVKGVTQPPLLTHTGSQASSAGPDPQTPNSTVALLARTPAPGRNDPSGASRERTQQSAVPVGGSAVAETAGPPNNKACEDRYANITVEYYYEPNSFVAKLNVNDTVNCDQCKKNEISNLKECENLNITISHSSCDSPNKTLTLEVPPDRGNFDLEDCTQKEKANTSICVRVEEKKNFTCDKSKIKYRLQCGKNITGNMQFEWEGFVPETDYSCYLNVSYNGQLVLNLSKIIETDFGSPDPPKNLICSSKNANSVVIIWEPPINTFHGYNVCYHINEEEAYFHQEMCQELGETVKQHQLQQLNPYTKYRVSVKAYTNGKVRREGSCEVCDVKTNESNPGPVRDLHFSRKSDNSVQVRCKPPAAYNGPKNGNYHLQIRIGDVLVNDLLNKACEFLVENLHYSTEYKFKVYYNNGKFDGASQNFSHTTSYNSRALIIFLVFLIIVTFLALLVVLYKIYDLRNKRSSDLDEEQELVERDDEKQLMTVEPIHADILLETYKRKIADEGRLFLAEFQSIPRVFSKFSIKDARKPFNQNKNRYVDILPYDYNRVELSDINGDAGSNYINASYIDGFKEPRKYIAAQGPRDETVDDFWRMIWEQKATVIVMVTRCEEGNRNKCAEYWPSMEEGTRAFGDVIVKITEHKRCPDYIIQKLNITNKKEKATGREVTHIQFTSWPDHGVPEDPHLLLKLRRRVNAFSNFFSGPIVVHCSAGVGRTGTYIGIDAMLEGLEAENKVDVYGYVVKLRRQRCLMVQVEAQYILIHQALVEYNQFGETEVSLSELHPYLLNMKKRDPPSEPSPLEAEFQRLPSYRSWRTQHVGNQEQNKSKNRNSYIIPYDFNRVPLKHELEMSKESEHDSDESSDDDSDSEETSRYINASFVMSYWKPEVMIAAQGPLKETIGDFWQMIFQRKVKVIVMLTQLKDGDQEACAQYWGEGKQTYGDVQVDMKETNKSSAYTLRVFELRHSKRKDSRTVYQYQYNNWNVDELPAEPKELISMIQALKEKSPKNSTEGNKHHKNVPLLIHCRDGSQQTGLFCALLNLLESAETEEVIDVFQVVKSLRRARPGMVPTFEQYQFLYDVIANTYPAQNGQIKKSNNQDDKVEFANELVDKAKQDANCVSSPGAPDKTNEGNKEDEGTKVTSSPEEPEHSANGPASPGLTQNA

SEQ ID NO: 279 - protein, 1282 aa, Pan troglodytes
  CD45
MTMYLWLKLLAFGFAFLDTEVFVTGEPEEEKSIIHATLNWRTRLGASGTVQVPELPPTSQTAAPALWAHSRPTQPGNAFWPLGPRAQARGRQHFAQLVHRRPGVGDMQRVLRLPIHFLQAQGPGPLAEVPGMAVQERSAQLGVPLGLTTAKMPSVPLSSDPLPTHTTAFSPASTFERENDFLETTTSLSPDNTSTQVSPDSLDNASAFNTTGVSSVQTPHLPTHADSQTPSAGTDTQTFSGSAANAKLNPTPGSNAISDAYLNASETTTLSPSGSAVISTTTIDEKYANITVDYLYNKETKLFTAKLNVNENVECGNNTCTNNEVHNLTECKNMSVSISHNSCTAPDKTLLLDVPPGVEKFQLHDCTQVEKADTTICLKWKNIETFTCDTQNITYRFQCGNTTSDNKEIKLQNLDPEHEYKCDSEILYNNHKYTNATPGQPQNITCRSEAAHQGVITWNPPQRSFHNFTLCYMKETEKNCLNLDKNLIKYDLQNLKPYTKYVLSLHAYIVAKVQRNGSAATCHFTTKSARGFRIKSVFFLAYFHNGDYPGEPFILHQSTSYNSKALIAFLAFLIVVTSIALLVVLYKIYDLHKKRSCNLDEQQELVERDDEKQLMNVEPIHADILLETYKRKIADEGRLFLAEFQSIPRVFSKFPIKEARKPFNQNKNRYVDILPYDYNRVELSEINGDAGSNYINASYIDVSPRDETVDDFWRMIWEQKATVIVMVTRCEEGNRNKCAEYWPSMEEGTRAFGDVVVKINQHKRCPDYIIQKLNIVNKKEKATGREVTHIQFTSWPDHGVPEDPHLLLKLRRRVNAFSNFFSGPIVVHCSAGVGRTGTYIGIDAMLEGLEAENKVDVYGYVVKLRRQRCLMVQVEAQYILIHQALVEYNQFGETEVNLSELHPYLHNMKKRDPPSEPSPLEAEFQRLPSYRSWRTQHIGNQEENKSKNRNSNVIPYDYNRVPLKHELEMSKESEHDSDESSDDDSDSEEPSKYINASFIMSYWKPEVMIAAQGPLKETIGDFWQMIFQRKVKVIVMLTELKHGDQEICAQYWGEGTQTYGDIEVDLKDTDKSSTYTLRVFELRHSKRKDSRTVYQYQYTNWSVEQLPAEPKELISMIQVVKQKLPQKNSSEGNKHHKSTPLLIHCRDGSQQTGIFCALLNLLESAETEEVVDIFQVVKALRKARPGMVSTFEQYQFLYDVIASTYPAQNGQVKKNNHQEDKIEFDNEVDKVKQDANCVNPLGAPEKLPEAKEQAEGSEPTSGTEGPEHSVNGPASPALNQGS

SEQ ID NO: 280 - DNA, 1656 bp, Homo sapiens
  CD45 Extracellular Domain
caaagcccaacaccttcccccactggattgactacagcaaagatgcccagtgttccactttcaagtgaccccttacctactcacaccactgcattctcacccgcaagcacctttgaaagagaaaatgacttctcagagaccacaacttctcttagtccagacaatacttccacccaagtatccccggactctttggataatgctagtgcttttaataccacaggtgtttcatcagtacagacgcctcaccttcccacgcacgcagactcgcagacgccctctgctggaactgacacgcagacattcagcggctccgccgccaatgcaaaactcaaccctaccccaggcagcaatgctatctcagatgtcccaggagagaggagtacagccagcacctttcctacagacccagtttccccattgacaaccaccctcagccttgcacaccacagctctgctgccttacctgcacgcacctccaacaccaccatcacagcgaacacctcagatgcctaccttaatgcctctgaaacaaccactctgagcccttctggaagcgctgtcatttcaaccacaacaatagctactactccatctaagccaacatgtgatgaaaaatatgcaaacatcactgtggattacttatataacaaggaaactaaattatttacagcaaagctaaatgttaatgagaatgtggaatgtggaaacaatacttgcacaaacaatgaggtgcataaccttacagaatgtaaaaatgcgtctgtttccatatctcataattcatgtactgctcctgataagacattaatattagatgtgccaccaggggttgaaaagtttcagttacatgattgtacacaagttgaaaaagcagatactactatttgtttaaaatggaaaaatattgaaacctttacttgtgatacacagaatattacctacagatttcagtgtggtaatatgatatttgataataaagaaattaaattagaaaaccttgaacccgaacatgagtataagtgtgactcagaaatactctataataaccacaagtttactaacgcaagtaaaattattaaaacagattttgggagtccaggagagcctcagattattttttgtagaagtgaagctgcacatcaaggagtaattacctggaatccccctcaaagatcatttcataattttaccctctgttatataaaagagacagaaaaagattgcctcaatctggataaaaacctgatcaaatatgatttgcaaaatttaaaaccttatacgaaatatgttttatcattacatgcctacatcattgcaaaagtgcaacgtaatggaagtgctgcaatgtgtcatttcacaactaaaagtgctcctccaagccaggtctggaacatgactgtctccatgacatcagataatagtatgcatgtcaagtgtaggcctcccagggaccgtaatggcccccatgaacgttaccatttggaagttgaagctggaaatactctggttagaaatgagtcgcataagaattgcgatttccgtgtaaaagatcttcaatattcaacagactacacttttaaggcctattttcacaatggagactatcctggagaaccctttattttacatcattcaacatcttataattctaag

SEQ ID NO: 281 - protein, 552 aa, Homo sapiens
  CD45 Extracellular Domain
QSPTPSPTGLTTAKMPSVPLSSDPLPTHTTAFSPASTFERENDFSETTTSLSPDNTSTQVSPDSLDNASAFNTTGVSSVQTPHLPTHADSQTPSAGTDTQTFSGSAANAKLNPTPGSNAISDVPGERSTASTFPTDPVSPLTTTLSLAHHSSAALPARTSNTTITANTSDAYLNASETTTLSPSGSAVISTTTIATTPSKPTCDEKYANITVDYLYNKETKLFTAKLNVNENVECGNNTCTNNEVHNLTECKNASVSISHNSCTAPDKTLILDVPPGVEKFQLHDCTQVEKADTTICLKWKNIETFTCDTQNITYRFQCGNMIFDNKEIKLENLEPEHEYKCDSEILYNNHKFTNASKIIKTDFGSPGEPQIIFCRSEAAHQGVITWNPPQRSFHNFTLCYIKETEKDCLNLDKNLIKYDLQNLKPYTKYVLSLHAYIIAKVQRNGSAAMCHFTTKSAPPSQVWNMTVSMTSDNSMHVKCRPPRDRNGPHERYHLEVEAGNTLVRNESHKNCDFRVKDLQYSTDYTFKAYFHNGDYPGEPFILHHSTSYNSK

SEQ ID NO: 282 - DNA, 198 bp, Homo sapiens
  CD45 A Domain
ggattgactacagcaaagatgcccagtgttccactttcaagtgaccccttacctactcacaccactgcattctcacccgcaagcacctttgaaagagaaaatgacttctcagagaccacaacttctcttagtccagacaatacttccacccaagtatccccggactctttggataatgctagtgcttttaataccaca

SEQ ID NO: 283 - protein, 66 aa, Homo sapiens
  CD45 A Domain
GLTTAKMPSVPLSSDPLPTHTTAFSPASTFERENDFSETTTSLSPDNTSTQVSPDSLDNASAFNTT

SEQ ID NO: 284 - DNA, 141 bp, Homo sapiens
  CD45 B Domain
ggtgtttcatcagtacagacgcctcaccttcccacgcacgcagactcgcagacgccctctgctggaactgacacgcagacattcagcggctccgccgccaatgcaaaactcaaccctaccccaggcagcaatgctatctca

SEQ ID NO: 285 - protein, 47 aa, Homo sapiens
  CD45 B Domain
GVSSVQTPHLPTHADSQTPSAGTDTQTFSGSAANAKLNPTPGSNAIS

SEQ ID NO: 286 - DNA, 144 bp, Homo sapiens
  CD45 C Domain
gatgtcccaggagagaggagtacagccagcacctttcctacagacccagtttccccattgacaaccaccctcagccttgcacaccacagctctgctgccttacctgcacgcacctccaacaccaccatcacagcgaacacctca

SEQ ID NO: 287 - protein, 48 aa, Homo sapiens
  CD45 C Domain
DVPGERSTASTFPTDPVSPLTTTLSLAHHSSAALPARTSNTTITANTS

SEQ ID NO: 288 - DNA, 246 bp, Homo sapiens
  CD45 d1 Domain
gctactactccatctaagccaacatgtgatgaaaaatatgcaaacatcactgtggattacttatataacaaggaaactaaattatttacagcaaagctaaatgttaatgagaatgtggaatgtggaaacaatacttgcacaaacaatgaggtgcataaccttacagaatgtaaaaatgcgtctgtttccatatctcataattcatgtactgctcctgataagacattaatattagatgtgccacca

SEQ ID NO: 289 - protein, 82 aa, Homo sapiens
  CD45 d1 Domain
ATTPSKPTCDEKYANITVDYLYNKETKLFTAKLNVNENVECGNNTCTNNEVHNLTECKNASVSISHNSCTAPDKTLILDVPP

SEQ ID NO: 290 - DNA, 267 bp, Homo sapiens
  CD45 d2 Domain
ggggttgaaaagtttcagttacatgattgtacacaagttgaaaaagcagatactactatttgtttaaaatggaaaaatattgaaacctttacttgtgatacacagaatattacctacagatttcagtgtggtaatatgatatttgataataaagaaattaaattagaaaaccttgaacccgaacatgagtataagtgtgactcagaaatactctataataaccacaagtttactaacgcaagtaaaattattaaaacagattttggg

SEQ ID NO: 291 - protein, 89 aa, Homo sapiens
  CD45 d2 Domain
GVEKFQLHDCTQVEKADTTICLKWKNIETFTCDTQNITYRFQCGNMIFDNKEIKLENLEPEHEYKCDSEILYNNHKFTNASKIIKTDFG

SEQ ID NO: 292 - DNA, 279 bp, Homo sapiens
  CD45 d3 Domain
agtccaggagagcctcagattattttttgtagaagtgaagctgcacatcaaggagtaattacctggaatccccctcaaagatcatttcataattttaccctctgttatataaaagagacagaaaaagattgcctcaatctggataaaaacctgatcaaatatgatttgcaaaatttaaaaccttatacgaaatatgttttatcattacatgcctacatcattgcaaaagtgcaacgtaatggaagtgctgcaatgtgtcatttcacaactaaaagtgct

SEQ ID NO: 293 - protein, 93 aa, Homo sapiens
  CD45 d3 Domain
SPGEPQIIFCRSEAAHQGVITWNPPQRSFHNFTLCYIKETEKDCLNLDKNLIKYDLQNLKPYTKYVLSLHAYIIAKVQRNGSAAMCHFTTKSA

SEQ ID NO: 294 - DNA, 273 bp, Homo sapiens
  CD45 d4 Domain
cctccaagccaggtctggaacatgactgtctccatgacatcagataatagtatgcatgtcaagtgtaggcctcccagggaccgtaatggcccccatgaacgttaccatttggaagttgaagctggaaatactctggttagaaatgagtcgcataagaattgcgatttccgtgtaaaagatcttcaatattcaacagactacacttttaaggcctattttcacaatggagactatcctggagaaccctttattttacatcattcaacatcttat

SEQ ID NO: 295 - protein, 91 aa, Homo sapiens
  CD45 d4 Domain
PPSQVWNMTVSMTSDNSMHVKCRPPRDRNGPHERYHLEVEAGNTLVRNESHKNCDFRVKDLQYSTDYTFKAYFHNGDYPGEPFILHHSTSY

SEQ ID NO: 296 - protein, 330 aa, Homo Sapiens [sequence omitted]

SEQ ID NO: 297 - protein, 231 aa, Artificial Sequence
  hIgG1 Fc
PKSCDKTHTCPPCPAPELLGGPSVFLFPPKPKDTLMISRTPEVTCVVVDVSHEDPEVKFNWYVDGVEVHNAKTKPREEQYNSTYRVVSVLTVLHQDWLNGKEYKCKVSNKALPAPIEKTISKAKGQPREPQVYTLPPSREEMTKNQVSLTCLVKGFYPSDIAVEWESNGQPENNYKTTPPVLDSDGSFFLYSKLTVDKSRWQQGNVFSCSVMHEALHNHYTQKSLSLSPGK

SEQ ID NO: 298 - protein, 232 aa, Artificial Sequence
  hIgG1 Fc
EPRSCDKTHTCPPCPAPELLGGPSVFLFPPKPKDTLMISRTPEVTCVVVDVSHEDPEVKFNWYVDGVEVHNAKTKPREEQYNSTYRVVSVLTVLHQDWLNGKDYKCKVSNKALPAPMQKTISKAKGQPREPQVYTLPPSRDELTKNQVSLTCLVKGFYPRHIAVEWESNGQPENNYKTTPPVLDSDGSFFLYSKLTVDKSRWQQGNVFSCSVMHEALHNHYTQKSLSLSPGK

SEQ ID NO: 299 - protein, 232 aa, Artificial Sequence
  hIgG1 Fc mutein
EPRSCDKTHTCPPCPAPEAEGAPSVFLFPPKPKDTLMISRTPEVTCVVVDVSHEDPEVKFNWYVDGVEVHNAKTKPREEQYNSTYRVVSVLTVLHQDWLNGKDYKCKVSNKALPAPMQKTISKAKGQPREPQVYTLPPSRDELTKNQVSLTCLVKGFYPRHIAVEWESNGQPENNYKTTPPVLDSDGSFFLYSKLTVDKSRWQQGNVFSCSVMHEALHNHYTQKSLSLSPGK

SEQ ID NO: 300 - protein, 39 aa, Artificial Sequence
  c-jun leucine zipper
RIARLEEKVKTLKAQNSELASTANMLREQVAQLKQKVMN

SEQ ID NO: 301 - protein, 39 aa, Artificial Sequence
  c-fos leucine zipper
LTDTLQAETDQLEDEKSALQTEIANLLKEKEKLEFILAA

SEQ ID NO: 302 - protein, 43 aa, Artificial Sequence
  modified c-jun leucine zipper
CGGRIARLEEKVKTLKAQNSELASTANMLREQVAQLKQKVMNY

SEQ ID NO: 303 - protein, 43 aa, Artificial Sequence
  modified c-fos leucine zipper
CGGLTDTLQAETDQLEDEKSALQTEIANLLKEKEKLEFILAAY

SEQ ID NO: 304 - protein, 33 aa, Artificial Sequence
  GCN4 leucine zipper
RMKQLEDKVEELLSKNYHLENEVARLKKLVGER

SEQ ID NO: 305 - protein, 33 aa, Artificial Sequence
  GCN4 leucine zipper- trimer
RMKQIEDKIEEILSKIYHIENEIARIKKLIGER

SEQ ID NO: 306 - protein, 33 aa, Artificial Sequence
  GCN4 leucine zipper- tetramer
RMKQIEDKLEEILSKLYHIENELARIKKLLGER

SEQ ID NO: 307 - protein, 44 aa, Artificial Sequence
  R subunit
SHIQIPPGLTELLQGYTVEVLRQQPPDLVEFAVEYFTRLREARA

SEQ ID NO: 308 - protein, 17 aa, Artificial Sequence
  AD
QIEYLAKQIVDNAIQQA

SEQ ID NO: 309 - protein, 45 aa, Artificial Sequence
  modified R subunit
CSHIQIPPGLTELLQGYTVEVLRQQPPDLVEFAVEYFTRLREARA

SEQ ID NO: 310 - protein, 21 aa, Artificial Sequence
  modified AD subunit
CGQIEYLAKQIVDNAIQQAGC

SEQ ID NO: 311 - protein, 5 aa, Artificial Sequence
  linker
GGGGS

SEQ ID NO: 312 - protein, 5 aa, Artificial Sequence
  linker
SSSSG

SEQ ID NO: 313 - protein, 5 aa, Artificial Sequence
  linker
GGGGG
